United States Patent Application Publication US 2025/0295137 A1 - sequence listing, part 14

SEQ ID NO: 14 - DNA, 1867127 bp, Latilactobacillus curvatus
  source 1..1867127: mol_type = genomic DNA
acatgaagactggtggcaagcagaaaaagcagccgtggaagccaactacgctaaaaacggtcaataaaaataaatagtttcagaataggatgatttaataaatggagaggattaaaaatacaaatttgtataatcgttttctaacatcgccaatgtacaatattgtgatgggattaaaacatcctattttgcttggacgatatttgaagtatcgaggctctgctgataaaccaaaagtagttggtcttgaaacgactttaaagcaaattacagtgcaaaaaatgtcggtcactcgttttggcgatggtgagttaaagtggctattgaatgagaatagctatgcttttcaagaaggatccgaagcattgagtgaacgtttaaaagaggttattacagcgactgatgcgcctaagttagcaatctgtataccagatgtttttaacggtctcagtcagtatatgccccaaaataaaaatgcttggattgaattaatagcgcgttacaatcatgcttggcgtccttatttacaagctcaatcagtattttatgatgcgaacatgagtcgcttctatattgaccgacgtgataaaagtcaaacggcgtattattttgaattactcaaacaaatctggcaagatcgtgaagtagttattgtagaaggacaagcaacgcgctttggtgttggtaatgatttattgagtaatgctaagtctgttaaacgcattttaggccctgcgcagaatgcgtttgatcaatacgacgctattatggatatcattaaggagcaggtagcatcagatgctttgattttaattgcattagggcccaccgcaacagttatggcttatgacttggctaagcttggttatcaggcaattgatataggacacgcagatttagagtatgagtggtatcaaatgaaggccacacaaagagttgctttaaatgatcggtatgtgaatgaagttgaaggtggaagtcaagtggctgaatcggaagctccagattatcatgctgaaattatcgcaacaatcagagaggattagttatggaatcaaaaaatcgtaatatttgtgcggtcttagttacttataaccgactagcattattgaaagaatgtttagcagcattagaaaaaaatgaaaatgttgcccacattgttattgtgaataataaaagtacggacggaacggctgattatttagcaactttatcggctgataagtttattatcaagaattctgatgaaaatctaggtggcgctggtggttttgcacatggcatggtcatggcttatgaacaaacagatgaccaatatttctggattatggatgatgacacgattcctaattcaaatgcagcacatcagttattagataaagcagcattcttaaaagatgattttggcttcttatgtagtaatgttcgctggatggatggcacatcatgtaatatgccaatgcctgcatttgaatggccagacaagattaatgatgggttagtgtctgtcagccaaggaacatttgtttcggttttcttaacccgggaaatagtaaaacaatatggcgtgccaacgcaagagcttttcatctggggagatgatactgagtatacaattcgagtcagtcaggcgaaatcatcttattttgtaattgacagtgttgtggtacacaagacacctaacaatttaacggatattactatttttaacgattcgaaggatcgtattaatcggtatttttatctatatagaaacttaatttacatcagtaagttatataaaggaaaaggggcaaccatcaaattaaccattcgtcatattctttatgcattttcaacgttaggaaaagctaaggatagtcgttttaaaagggctggtgctatcttaaaagggacgtttactggtttagggtttaatccgcagattagacgagttgattaatattagatagtaggtagggtatggaacagttattaattttaattagtgttattcaaaaaaatattttaaatatcccattcttctcacaagctgcttttttaggcatacttattattctttatcgacggttagtggaccatatttctttagaaccgttggataatttaaagcttagacactatgccttcatcgggttgcttgcacttagccaactactagcttttattggattaacaaatgaaggctatggaatcggtagtattttaaagaagttcattattgcgatgattacagttgctaattttttgattctatattttgttatgaacctattgatgcggaatgattatcagattaaaaagattgtaacggggaatttttgggcatttgtcctattgattggcatttgtctggttcaaattatttatgtatttttaggtggtcgtttagagagtatcgtcgaattaatcggacggtatctggaatatcataatattctaaatcctggttcttttgaaaaaattagttacacgcaaagtacgcaacgggtaaatgggttatatgcggaatctggatttttagcaggagtattggcgattggttttgcccccttcatcattagcgcgatgaaaaataagatcaacctattttttccgaatagtcgctatcatggctggttttattatgggttattcgctgtattgatgggcgtgttggtgcttgctaagacaagtaccggtattctggcagtcgttgtaatggcgttacttttactatgggctgtcaaaggtcgggaacggttaaatctaatcgttctgtatgttattgctggattattattagcattaatcgtaatgagagtaccagcgttaaaaaatatgttattaagttttacagttggtaagacggattctgattcaacaacaatgcggctattagcaacacaagcggtgtttattactgttttaaagaatccgttgattggtgttggctttggtcaaactagtcattttaatttcatcaatgcaccatcatcagttaaacaactagctgaatatcaattatttttaaagaataaagaatttccagatcaaagtgcgtggggagctgtgctagcgcaatttgggctgattattggaatcattattgtgatatatattattcatctattactcgatttgaaaaaatcaacgaaatggttacaaatacatcaaatcacaggatatcagtacgatcaagcgatttatgatagtgccgtttatttcacaattatcttcttagtattaggaatgttatccatccaatggtcatttgatttatttattttaatgtttttcttctttgttaactatagacactatttgaatcgtaaaatcacaaataatttaaaagatggtgaggtatatatttatgactaattatttagtagttggttctggcctgtttggcgcaaccttcgcatatgaagcggccaaacgtgggaaccatgtaaaagtaatcgaaaagcgggatcacatcgctggaaacatctatacaaaggaagttgatggcatccaagtacatcaatatggtgcccacattttccataccagcaacaaagaaatctgggaatatattaaccaattcgcagaattcaaccgttacaccaatagccctgttgccaactacaagggtgaaatctataacttgccattcaacatgaatacgttcaataagttgtggggcgtagcgacacccgctgaagcggccgctaaaattgctgaacaacgcaaggtgttaggtgataaaacacctgaaaatttggaagaacaagccatttcattaattggaacggatatctataaaaaactgatcaaaggttatactgaaaaacaatggggccaaaaagcaaccgaattaccagctttcattattcgtcgcctcccagtccgtttaacttatgacaataactacttcaacgatacataccaagggattccaattggtgggtatacacaaatcatcgaaaagatgttagatagtgatttaatcgatgttgaaactggtgttgatttcttcgataaaaaacaagaatatattgatcaatacgataaagtcatctttactgggatgattgatcagttcttcaattatcaattaggcgaacttgaataccggagcttacgttttgaaacggaagaaatggatattgataactaccaagggaacgcggttgttaactacacggacgctgaaacaccatacacgcgggtgattgaacataaacattttgaattcggtaaaggtgacaagaacaagaccatcgttaccaaagaatatcccgctaactggtcgcgtggcgacgaaccttactatccaatcaataacgataagaataaccgtttgtacaaagcttaccgtgacctatcatcgacagaacccaaagtggttttcggtggtcgtttaggccaatatcgttattatgatatgcaccaagtgatccatgcagcattacaagtcgttaaggacgaattaaaggattaatcaatgaagattattaagaactatctctataatgtgttctaccaggtatttgtactgttagtaccactcattacgatgccatatattgcccgggttttaggcccaacgggcgttgggattaactccttcaccaattcaaatacgcagtactttattttaattgggagtatcggggtatctctatatggaaatcggcaaattgcttattatcgagataatcgagcgaaagcttctcaaattttttgggaagtttttctaatgcgattagtgacgattgtggctgcattagcacttttctttggctttttatggtttgttaaagactatcatcaagcttacttgatgcaagcgattttgattgttgcggcagcatttgatatctcgtggttctttatgggctttgagaacttcaaggtaacggttttacgaaacatcatcattaagttaatctcgcttgcctgtatcttcatatttgtgaagaaccagggggatttaacgttatacattgcaattttatcaatctcgcaattgattggtaatttaacgttattcccatatttaaaacactatattgatatgcctgactggcataaattaaaaatttggcggcatttccaaccatctttagtcttgtttattccgcaaattgcgacacacgtctatttaatcttaaataagaccatggttgggaaaatggtttcggttgaagctgccggcttctatgataattccgataaaattgtcaaaatggttttagcaatcgtgacagcaacgggaactgtgatgttgccgcgagttgccaatacgtttgccaaaggtgatcacgaacaagtgaaaaagtatctttaccagtcatttgattttgtcagtgcggtttcagtccccatgatgtttgggattgcagcgattgcgccgaactttgcgaccatgttttttggcaaggatttcgccgctgttgggccattgatgatggtcgagtcgatcgtgattctaatgattgcctggagtaatgtcttgggtgtgcaatacttgatgccaaccggacacaacaaagaatttacgatttcggtgacggttggcgctgttgtcaacattatcttgaatgtgccaatgattttatggttagggacacaaggtgcaatgattgcgacagttatttcagaaatcagtgtaacggcctatcaattctatgtcgttcggcatgagttaagtattcgacaaatgacggcggaagtgtggaaataccttttaggtggtctgatgatgtttgccgtagttctttatttgaacctaacgctaccatttagtatgttacaactagttttacaagttggcgttggtattttgttatacggcgttgtattatggttaacgaaacctaaattattgaattatatcaagcgaggagatcactcatgaaaattttaatcactggtgcaaatggtcaattagggaccgaattacggcacttattagatgaaaatcaaattgaatacgtggggacagatgctactgagttagatattactgattcagcggcagtcacaacttacttcgaaaagaataagccggaattggtttatcactgtgctgcttatacagctgtcgatgctgctgaagaagaacctggcaagtcaatcaattacaaagtgaacgtggttggaacgcaaaacattgccaatgctgctgaagcaatcggcgcaacgcttgtttacattagtacggattatgtctttgatggtacgaatgatcaaatgtacacagaagaaaccccagctgcacctaagaatgaatatggtcgcacaaaattggctggtgaagaagccgttgcaaatacgatgagcaagtattacatcatccggacatcatgggtctttggtgaatatggtaagaactttgtttataccatgttaaaccttgctaaaacacatgatcatttaacggttgttagtgatcaagtcggtcggccaacttggacccggacattggctgaattcatgttatattcagttaaaaacgacgtcccttatggtttataccaactttcaaatgacaattcatgtacttggtatgaatttgcgagtgaaatcttgaaggacaaagctgttgaagtgagtcctgttacatcagacgaatatccccaaaaagccttccgtccaagacattcaattatggatttaacgaagatcaaggcaactggatttgaagtaccaacctggcaagatgcattacaaaaatttatggcaaaaatcgattagtataattaaaaaggtgagtaatcatatgattgctcaccttttttaattatactaataacgcactaaacttcttttgcaccttaaacttaatattattagccgttcgccgtgtgatgtttaagtctgcggcgatttcttttagggtggcgttgtagaagtagcggaggactaagaagcgtttttcgcgtggtgtacaaacttgatagagacgctcgaagaggtcgttacagatggcagcctcttctggattgcagtagggatcagcaacttggtcgagatagtccatcacggaatcatcatcgtttgcccggttaacgaagccaattcgtttgtcatggttattatccttgcggaaggtcatcataatcgcccatttaacggcctgatacgcgtaaaccatgaagcggtgggtttcgacttcaatattgcctgggaaatgatcgtaggcttcgacaaaggcaatgacgccaatttgatagagatcggcgaagttgctacgttgtcttggaacgtggagatctttgagaacgccatagatgagggtgtcgtcttgtataataaaatcaaaagcagtttgtaaatctgattgggtcattgtaaagcatcctgtctactatgagctcacagtgtgaattaccggtaagttcactatagcgggtttgcataaagaagggtaatcgccgattttagcggtaaatcaatccgtttcagctttaatttgcgcaaatgcattgaaatacaaatgaaaattattgtaaatagcgacttcgggttaatttataattggcgtaatttttgaattagttctttaacacttttgatatagcactgaatgtcaaatacgctgaattcggggtattcatggattacggcttggtaaatgaaattttccttatgcattttaagtgcgttgagtaatccgagtagttcagtagctgttttcggaacattcgagcacagatggcaatggcaatcatcgaagcgatggacgatgcttggcttgaaacaagtcttgagcttgatttgatagccgaaattagtggcacacacagtgagacagccaagttggactttgccaatggctgcacattgatgaatttcagtatcgatttgacggcctttataagggaggatacaggtacagtcatttagcaatgtaacgtagagatggttatcgctaacttcgtaatcacggacgtagtggagcgctaaccacggtgcgttttgatgagccgtgccacttaatggtaaatactgatattcgccattgatgtgtggaatcttacgataccaattgaaacaatggcaaaggtgccggggttgtgagaagtccatgatctgatggcgattataagcgcgcattagttgccgggtagaacgcggactaatttggagaccggttatgcggtctaacacaagactttgcgattttttatagggaataatcaccattgtgtcactcgtaatactagtttggtaagaacggggaattgacgattgatccagctcacagaagttataatcaacaccgcgcttgatgatgagtggcacaggaagacactcgtgatatgtattgatatgtttgggatgtagtagaaacatcgaagacctcctttattgttaacctcttgagaataccaatgatgggaatcgcttacaaaacaattgtgaaaagattaataaagtcctaagcgcttgttaatcttttcctcattttcggcatataattggtgcaaatccacttttttatggcatactgttattagactataagttatgggggattttagtagatgaaagtacgtaaagcagttattccagcagccggactaggcactcgttttctaccagctaccaaagcgatggcgaaggaaatgttgccaattgttgataaaccaacgattcaatttatcgtggaagaagcaaaggcttcagggattgaagatatcttaattatcactggtaagggcaaacgcccaattgaagatcactttgattcagcaccagagttggaacaaaacttgaaagccaagaataagaccgctatgttgaagatggtcaacgaaacgactgatatgggggttaacttgtacttcattcgccaatcacatccaaacggattaggggatgcagtgcgccttgcaaaatcattcgttgctgacgaaccttttgtcgttatgttaggtgatgacttgatggatgataaggtgccattgagtaaacaactaattaatgaatatgaagaaacacatgcatcacaattagccgttatgaaggtcccacataatgaagtggacaaatacggcgtgattaacccagaaaacaaagttaaagacgatttatacaacgttaagaacttcgttgaaaagccagatattgataaggcacctagtgatttagcgatcattggtcgttacttattaacccctgaaatttttgatgttttagaaaaccaaaaaccgggtcttggtggtgaaattcaattaaccgatgcgattgatgaattgaacaagacccaacgcgtcttcgcccatgaattcaaaggccggcgctacgatgttggtaacaaattcggttatctagaaacaagtatcgaatatgggttaaaacacccagaagtcaaagatgacttgaagaaatacattatcgacttggcagaagaattaaaaaaagacactaaaaaagaaaataaataacctgtaaaaaacgttcaaccactccgtacattggagtggttgaacgttttttgttgttttaaatgataagcccttcgcagtgatccacctcatgttgaataatctgtgcaatccagcctgagaaagcctgcttgtgcggcttaaaggattggtcttggtaagtgacctcgattgtttcataacgggttgtcggacgttcaccggtcaatgaaagacaaccttcagttgtttggtatggtttatcctgacgcacaatctgtggattcacaagaatcacaggtaagacgcccatttgaacgatgataatccgtttattgatgccaatcatgttggcagccattccgacgcaacgttctgtgttggcttgtaaagtatcacgtaaatcggtcagcacatcggtatcagctggtgttgctggaactgctttttgagctaagaattgagtgtcacgcataatgggtttaatcatagtagactccttgagtagtagttcttccattatagcagaaaataaactcattcaattctcatttagtgaaagtccgccttatctgcgggcttttttaatgcgattatttagggattagagtctgcttttcaatattgtggtaaaaaattcgacaaatttggattttatgcttataattattaacatactattataaaacgtctaatctaatcttaataacgcgttaagagcgatgagagaagttggtcaggcattaggggaggatcacatgaagaaattactcgtatttttaggcagctgtttactcgcaggcttatttgtatttgggagtcaagtgaataatcaggttcaagccgctgaaaaaacttatgaaatcggtacggatgtgacctatccaccattcgagtttgcgaatgagaagaatcaatatgtcggtattgatattgatatcatgaaggcagttgcgaagtccgagggctttaaagtgaatattaaaccgttgggattcaacgcagcggttcaagccgttcagtcggaacaaattgacggcgtgattgccgggatgacaattacacctgaacggcaagcaaaattcgatttcgctgatccttactacaagaccggggttgtaatggccgttcaaaaggacagtaagattaaaggcttagaagggttgcgcggtaaacgtgttgcgattaaaacagggacttccgctggggcctatgcgacggccaaagcgaaagaatatggctttaccaccgttacgtttgatgattcagataatatgtataatgatgttgtgaatggtaattcggcagcctgttttgaagacgagcccgttatgcaatatgggattaagacgggcttgaaactcaagattgtcaccaaacctgctcaaggtggcgaatatggattcgccgttaagaaagggagcaatcctgaactcattgctaaattcaataaaggtcttgctaaattaaaagcaaatggtcaatacgacaaaattaaagcaaaatatttaagtacagaatcaactaaaaaagcaaccgttgatcacagcttttttggattattgaaagaaaataaagatgcgttgttgagcggtttaggccagacgttattattaacagtcattgcgattttcttcgcaaccatttttggggtcttcttcggtttactcggcgtattacctaaccggtttgcgcgtggcgtttcagatacggtcatctatattttccgtgggttaccactcttggtgcttgcgttattcatctatactgggattccaagtttaactgggcagaagattccagcgattgtggctggggtcatcacgctgatgttcaatgaaggggcttatactgcagcctttgtcaaagggggcattggcgcggttagcaccggacaaatggaagcagcgcggagtttagggttaccatatggtaaagcaatgcggcgcgttgttttaccacaagggatccgcattatgattccatccttcattaaccaattcatcatcacattgaaagatacgtcaattttatcaatcatcgggattctcgaattgacacagacgggtaaaattatcatcgcccgcaaccttgaagggttcaaaatttgggcaatgattgccttaatctatctgatcgttatcacgttactcacgtggttatcgaagtacattgaggggagaatagataactaatgaatagaattgaagtgtctcatcttattaagaattacggcagtaacgaagtgttaaaagatttggacttaacggtcggtgataatgaagtggttgtcatgatcggcccctcaggttcaggaaagagcacgttcttgcgctgcttgaatcgcttagaagaacccacgagtggtgagattatcgttgatgggtacaacctcagtgatcctaagagtgatttgaatcaaattcgcgaaaaaatcgggatggtattccaacactttaatcttttcaaaaatctaacggtcgctgaaaatattacactcgcaccagtggaactcggtaaaatgacgccggcagaagcaaaagaaaccgccaagaaactacttgaaacggttggtttatcagagaaattcgatgcaaaaccacaatcgctatcaggtggtcaaaaacaacgggtcgccattgcgcgtgccttagcgatgaaacctgatattctcttgttcgacgaaccaacatcagcgctcgatcctgaaatggtcggcgacgtgttggccgttatgaagcggttagccaaagaagggatgacgatggttgtcgtgactcacgaaatgggctttgccaaagaagtggcagaccgcgtcatcttcatggcagatggacacattgtcgaacaaggcacaccacaggaaatctttgacaccccacaaaacgaaagaacaaaagacttcctgaacaaggtactaaatgcatagcgtgcgtttcaaaaagcacgtttaacgccaaccaaaaaagcggcccaccattacttggtgagccgcttttacgattcttaggtctttagaatgttagaatagaaataggaactagtagagaaaagagggatgacgatgcgattaggcttaaaagcagggattaacgatcagcaaattgctgatcgaatgcagtatcagccaacgtattttgaatttcatctaacagccgaagatgtcacgccaactgggctagtacgtttacgcgaaaaaattcgttatgtacgcagtcagcaggttgaacggattattttacaccacccaatgagtttcgaagggcatcatattgaactgtcgatgaatgaagcaagttcgccagcccgataccgctttttatggcaatcaacactcgatttattgcagttagcgaaagctgaagatgtccaactattggtgcatggctcttatgatgatccaattgaagaattgacgacgggttacagtaatattacggatgccattcgtgttttgttcaagcgcctcgattatttacagcggattggcggacaaaatattatgttcgaaaattcaatttcaccgattttctattatggcaatccgatttttgatcaggccatctttgataaaggttaccgcttagcgtttgatacgagtcactgttttatcaagttgcagggtgatcagaatgctttcttgcagagtctggcaactttgcgtgagcacgtcgttcattatcatctggttgattcgatgggtttgaagcatgatgggttgcaattagggactggcaaaattgactgggcccgcgtattgccattgttaaatcctgatgctagttcgatctatgagattcaattagccgatcaaaatgatgcacgagaaatgattgcgagtcatcgttatttaacgcaacttgaacaaacattatccgagtagaattttgtcagcagcaacgcgaaaaccaaacaaaggatagtcccccgtctttgtttggacatacatataatgttggtagtagtttttttgatttaataataggctaaattcccactgcttcagcggctttttgtctgcggcctttaactgcagtaatagtcgtggctgttcgtcaacgacggcgagctcaaagtgggcgataggttggagctcttcagggccttcgaagtagatgccatcgtttttgggtgtatcagctaatagctgtagtaagtcaatgacgcgcatgataagtcgtcctttctaatagtgcgaaaatcccggcaataatcagccaacaaacacccgacaagctagcggcgatggttaggataattgccattggtgttagaataccaatgagccaagtcgtggtgttgactgttggcacaaatgaaaacagaccagtaacgaggcagaccgcgatgactgtggcaataatccctggaatcgtgcctttaaaatcagctgcggataagtcaaaaccaccgatggcaatcatgctagttaagattaaccagagcaagagagcactcggttgcgtcgtccagagctggctgaacaaggggccgatggcgtttaactgccaagtgggatgttcagcaaaggtcatccacgttgcaaaagtgggccgtgctaataaccaagtcagtccgaaaatggcggctgaacaaccaaaaatcggggcaatcccaatccagagattaccaattgttggccaaagacggccggaatggtatcggtgattgacatggccaagcgagtgatcgggattatcccgtagatttaattttaagagttgtatatcgataatttggtgttggaagattaaacaggcaacagcatggctgagttcatgaatcacagtgcctaggccgccaattaaaagttgtgagtaatcccaccaatgggctaagcgccgtttagttgaacgattgattagtgttaaaatcccggcaaaagctagtggtagcgcaattaccagtaaacaattaagtaacattgattgcaatatttgcgataagttaaatgaattgggcatgataactcctttgaacgactttatgtaagcctacaccaaagtttatcgcggaaacaaggggtgttaatcaatttatgtaaaacgcaaaaaaagcccccaaatcagattcgatttgggggctgtatgctgcttaattatttgtcagaaaagattggtgtttcaatctgttcaacgtatttggcaccaactggttctttgtagagttcaattccttttttaataaacatattggctgctgcgattttagtcatcgcacttctaactgtttcggcgtctaagttgtcatcaatattgtttaagcgcaatacacgactcttagcatcactgtttttaaattctaagcaaagttgtttcatcttgaattcctcctcaaagattggtatgttttttatttagcgatataagcagatttagtggttagagtagctgttgcaaatgtgtcacctgcgtggagacttgcgagggcttcgccaactgcttggatttccgtggcttgaacgtcttcttttacggcggtcatacgacgttgtaaactttcatttggatagtctgtattttgtaattcaaaagcgatcgatgttgctaaccatgatgtttgcatgtggattcctcctaaagattagttgtaagcgtcaccggtgaatgacttacgctaatgagtaatgcacgatgccgataaaatggtaaaataatctcagcttaccaagcggatttctaaaaaaaagttaaagaaattgtgaattaccagacgtttcatgaaaatttagttatagtaataattagacttatagatgaagagggatattatgcaagaagtggttattatcagtgcaaagcggacaccgattggtaaattggggggccaacttgcaagtttaagcgcggttgaattggggacagttgctgctaaagcggcgattgaagcagccgggattgatccaactcagattgatcaagcaattttcgggaatgtcttacaagccggttctgggcaaaacgttgcacggcaaatcgctttgaagagtgggatgacacaatcaagcacagcaatgacagttaatgaagtttgtggttccggcttaaaagcgattcggttggcgcagagtgcaatcgtcatgggcgatgctgacatcgtcttagttggcggtacagaaagtatgtcacaagcgccttatttgaataaacaaatgcgttttgggagtaaatttggggaccaaacaatgattgatagcatcagtagcgaagggttaaacgatgcgtttacgcaccagccaatggggattacaggcgaaaatgtagcagctaaatacggcattacgcgtgaaatgcaagacgcttttgcactcgcttctcatcaaaaagccgcgcaagcgacccaagctggttggtttaatgaagaaattgtgcctgtaacggtgcaacaacgcaaagcaacgcttgaagtacaacaagatgaaggtatccgcccaacgacaaccatcgaagcaatggcgaagttgcgcccagcttttcaacaagatgggactgtaacacctgccaatgcttccggcattaacgatggcgcctctgccatgatcgttatgagcaaggaaaaagctgctgcactcggattagtttaccaagccactttggtcggctatcaagaagtcggtgctgatccagattacatggggtacacgccggtcgatgcaattcaaaaattattagcgcaacaaaatcaaacattagccgatatcgatttattagaaattaacgaagcgtttgccgcttcaagtgtggccgttcaaaatgggttacaagtcgatcctgctaaagttaatgtggccggtggcgctattgcgttgggccatccaatcggtgcttcaggtacgcgcatcatgacaacgttaatgcaccaattgaaacggacgcaccaaacaacagggattgcttcgttatgtattggtggcgggttaggaattgcttttgaaattcaattaaatgaggcatggtgtaatgaaaaagcctaagttctatcaattaacgaaggatgaacgtttagcaacgcttgttgaacaaggtcacctaagtcagacggatgctgattgtttagcagctgcagaacccttgtcagatgagatcgctggtaatatgattgaaaaccaaattggccagtaccaagtaccgcttggtgtggtgcaagatttattagtcaatcagcaagtctatcaagtcccgtttgcgatcgaagaaccatccgttattgcggcggctaataatgcggctaagatggcacgagctaatggcggctttgtgactgaacaactgacgcggctgatgactggtgaagtcgtgttagagaagctagttgacttagtagcggctaaagcttggattagtggcaacaatgaccatttatttgaagttgcgcgggctgcgcatccatcaattgttaaacgcggtggtggtcttcaaaaaatcacgccgacgattattgacgaccgctttttgaaacttgaattgcaaattgataccaaagaagcgatgggtgccaacattgtgaacacaatctgtgaagccatcgcacatgctgtgcaagaacagttgggcggcacccttttattgagtgttttgaccaatgccgcgtttgaatccgtggtgaccgcaagtgtgacgattgatccagctaccttaacaactgcgacgcttgctggcgaaacaattgccgaaaagatgattgcggcgagtgactttgccaaagtggatgtggcgcgcgcagcaacccacaataaagggattatgaacggcatcgatgcagtggtgttagcgacgggcaacgattggcgcgcaattgaagccggcgtgcatagttatgctgctagaaagggtgcttaccaaccgctttcgagttgggaatggacaactgatcagcaactacgcggtcgaatcgaactgccactgccagttgggatggttggcggatcgattggtattctaccaaccgtgcagattaatcagcgcttgttaaaagttcagaatgcgcgtgaattagccggcattatcgcagctgttggcttagcacaaaattttgccgcgctcaaagcacttgtgtcagacgggattcaaaaaggacacatggcgcttcaagcgaagtcgttggcgattgccgctggcgcaaccgagactgaattaacgcaattattaccattattattgaaagcgacacatttaaatacagcaacagccaccgagctgttagcgcaactgcgtgctgaaaacaaatagattggaagattattatgcaaatcggaattgataagatgggcctttttacgcctaatacctacttagatttagtgatgctagctaacgcgcgaggcgttgatcctgacaaatacacaattggaattggtcaagatcaaatggcaattgcccccctcagtcaagacagtgtcacaatggcggctaacgcggctcttgaagtgttggatgatgataatcgtgattcaattggtttattaattttaggcactgaatcaggaatcgatcagtcaaaagccggtgccctttatgtgcaacgcttattaggattaaaaaatgctcgtgcttttgaaattaaagaagcttgttacggggcaaccgctggtttgatgaccgcttatgactttgtagcggcgcatccagagcaaagagcattagtcatcggttccgatatcgcccgttatgggctggatacaccaggtgaagtgacacaaggtgctggcgcggttgcaatgatcgttagtgcagcaccacatttgttggcgttagaaccggcaacggccatccacagtgatgacattcaagatttctggcgccccaactattcaaaagaagcttttgcgcgtggcaaatattcaactgaacaatacatcgaatttttccaagcaacttgggcagactatcgcgctcaaactggccgcacaatctcagatttcaaagccttaacgttccatttaccatacacaaagatgggtttgaaggcattgcggacaatcctgccagaagcaacggaagcagaacaagcacatttattagaccgttatcaagaaagtacattgtatagccgtcaaattggtaatatctatactggcgcgttatacctaggcttcctttcattgttggaacaatcaacgcaattggcagccggcgatcgaattggtttattcagttacggttcaggtgcaatcagtgaattcttcaccggtattttgcaacccggatttgaaaaacaattagccggtgcggaccacaaagcaatgcttgctgcacgacgtcaattgacgatggctgaatacgaaaatcaattccaagcagaactaccagaagacggtagcaaatatgaaattgatttggcaatggacaacgcgccaatcattttaaaaggtgttaaggaacacgaacgcaattatcaagttagagattaataaaaaaacagctatgtatcctaaaaactgccattaacagtattgttaatggcagtttttttagctatttctgataaaaataacaagtcagaaatgatggaaaaacttttttaaatttaagagcattttgattgtatccggtcacagaaggtgctatattaatggtgaggaaagatagcttggtaagtgaaaccaagttagctttaaatagatttaccactttaaaacacaagcaccagatttgaatgtacgacacatcaagatttaaagtacgaaaaagaaattgcaaggcgtggttccaatggaaacataagtgtaactcttcgtagtattaagatctaagtatatcggaggctgatgtctgttaaagaatatcgctcaagtagtaaacacgaatttaatcgtcatcgctaaaactgcacatgcgggtcaaagatagacgaccaaactagatcgagtgaaacgattagcagtgggctagaccaacgattaaaaacaattgaatagaagtatgaggtgtaacattatccagaatgtaaaacagaatcagctcgcaacaaccaagctatcaacctcaacctaggggattcaagcatatcaaagcttgaatcctttttttatgctcaaaatacaatataaatagccattcactatagataacaaatgaatggctttatttttaattaggcgtgggcttgcactgcctcaatcaacgcgtctaaattattcacaatcgtgccgttttgtttaattaagccggttgtgtaaaggtttaagtaatggaattggttttcggcgatctcttgtaaagctgctagtttttgcggatttgtagcaccttgttggcggctgtcggtgtataatccgatcattggaatttggcgaccgtatgccacaccgatttcactagcaacgccaacatcgatggtaggaccatccaaaacagcaatgacgagatcgctagcaacgagttcgtctgtatcggcttgtgcgatcatttcagagctggcataagcattcttgtcattaattgcggcgttttcttgtgggagatagatatcgacaccaggaatcgattggcgcagttgagcaacaaccttagcgttataatcaaagtctgctgctgagaatagagcgtttgcgaaataaattttcataagaattcctccaagttgattttctttattgtatcaaattagtggtgaaatgcggtacaattaagttaatcagttttggaaggggattcacaatgcgcgagattcaagaaacaccagggcaagtaacgtttaagtcagcttggcgagattattttaaaggttattttgattttacggggcgaacaacacgtacgggttattggtgggcgatgttgattttaatgattgtttggttcatgccatttttcgctttgctatttgcacaagctgcaaaggtgcaactgaagatgagcggtgcattagtgctgtacataatcgttatcgggttgcttggggtactcacgtttattccaacgttggcgcttagtgtacggcgttatcgggatgctgggttaaatggtcgcggagcaattgtattgtggttattgaacgggtttgcatcccgttttacatcgggcaatcaggggcgcgcatggacgttaatttcggcgttaagcggaagaaagtggttgtgaaagcacgtttcaaaaagagtgcgtcacaaccgaaacgatctgagcattaaaaaatgagagtgtggcataagtcgggtatatcctgaggattaacacagaatggtgaaggattgcttcaagcaatcgtttgccattcagggttaaccggaaggatatgacttatagaacgcgtttaggcgattaaagtccaaataaaaaagcggtccatcaacatgtgtttgttgatggaccgcttttttgcgttatagatcgcgttttagtgttaatgtcacaactgcttcaactcgtgccgtttgggggaacatgtccaatggttggattttttccacttggtacgtatgcacaagggcttttaaatcccgtgcaagggttgatggattacatgagacgtagacaaatttcaatggccgactgtctaaaatggcatcaattaatttttgatctaagccagtgcgtggtggatcaaccaccaaggcagttgggacgaagccattatccaaccattctgggaggaggtcttcggcagcccctacggcatattcaacgttttgaatgtcgttgatggctgcgttgtgtttagccgcttcaattgaatcggcaatcgtgtccatgccgcgcacttctgcgacttgattggcaagactcaagccaattgtacccaccccacaataagcatcgacgaggcgatcttcaggtgtgagatcaagtgcatcttgaactaagttatacatcttagccgtttgaactggattcaattggaaaaaggcgcgggcagtcaattcgaagtgaacgtcgtttaaagtttccataatcgtttcttgaccagccagatgaatcgtttggtcgccccaaacgagcacgtttttccctttgttgatattttgcatgattgaaaccacttcgggcaattcagcttggatggctgtaatcaatgcgtgcttttgcggtagtttaggggagttggtaatgaaggtcagttgcgcttcaccggttgaaaaagattcgcgaacgaccaatgtttttaaaatcccggcattcttagtttcatcaaagacgggaattccgagtgattcgactaatttcaagacggttcggatgattttcattgttaaatcggtttgggttgcgaattcaggcaaatcaattaaagtatggctacttggagcgtataagccagctgctaaatgaccgtcgatttcgcggacttggaattgtgctttgttgcgataatgccaggggttttccattccgactgtatcggtaatattgtatttggcgtagccttgtggtttgaatttttcaagcgcttggacgacgacgtcttttttgaaggcaagttggccaggatagcttaagtgttcaagctcaatcccaccgacttggccgtaagtggcatccttaggggtaacccgttgtggtgaagcttggcgaagtttgtggacttttgcttcaatgaaacgaggggcaacgttggtgacttctgcgacaaccacttcttcaggaagtgcgcctggaataaagacaattttgcgtttgtaatagccaatcccttcaccattgatgccgattcgtttaatcgtcaatggaaaacgttggccgacttcgacttggtttgtttgttctggcatttaatccgctcctattaatataaaataatgatactcgtttttctcattgcattcagtataacagacttagcactgaaaaatcgcttcaatagtgggaattaagcagtgacttttgtccgggtgcgccatttatgctatgctacaggaagtcaaagtaaggagcgaagccacatgaatttttgggaacgaaatcaatttttaatcgccatgctgattgtactcggaattggcgtttatgccttccaacacaagagcttaccactgatcatcgggactttagtgctcgccgtcgtggtcattggatttaaagtctatttaaacatcaaagcaacacgtaacaagggagaataacatgccgaagattaccaaaataacggcacagaaaaaatcaggccgctataatatttttatcgatgagcaattcgctttcggcgtgaccgagagtgtcttgattaaataccgtttagcgaaggatttagagattgatagtcaactgcaacgcgacattcaaaaagacgatgataatgccaaagcgtatcaattggcgctcaattatctgagtcaccaattgcggacggaaaaggaactaacgcaatatttacgcgaacacgagatcactccagaagggatccagactagcttggcaaaattacgcgagttacattatatcgacgatcaggattacgccgatagctacgttcgtactgtgattaataccgcggataagggccccaaagtggtccgccagaaattaatccaaaaaggcgttagtgctgcccatatcgatcaagcacttagtcattattcagtggatgatcaagttgcggttgggttagcagctgctaagaagttggcgaagaaataccgtcatagttcattctttgaacagcagcaaaaagtcaaacaaggtttaatgcaaaaagggtttggcggtgacagccttagtttaattattgaagcgttggcccttgaagccgatgaagatagtgaagctgacgcgcttgctgaacttggtgcaaaaaaatggcgccgttatcgattactcgaaccacgagaacgccggatgaagatgcaacaagcgttgtatcggaaaggatttaatattgatgcaatcaaccacttcatcgacgaacaagaactatcagatgacaccgagtgaacgggacgcgtttcaaaccgcgtttatgacttggtatgatgaaaatcgccgggacttgccttggcgccagaatcaagagccctatcgtgtctggctatctgaaatcatgctccagcaaacgcaggttcaaacagtgattccgtactatgaacggtttttggcgacttttccaacggtggcagacttagcggccgctccagaggacttattaatgaaaacgtgggagggacttggttattattcgcgcgcgcgtaacttacaaaaagcagcgcgccaagtcgtcgacgattacaatggtcagtggccaacaaccgcggctgaattagaaaagttagccgggattggaccgtacacagcgggcgctatcgccagtatttgttttggcgaagtcgtcccggcaatcgatggcaatgcttttcgggtgttcagtcggttattgaaaatcgatgctgatattgccaacccaaagaaccgccacattttttacgatgcgattttaccgctgattcccaaagatcgcccaggtgactttaaccaagccgtgatggattttggctcgcaagtttgtacggcaaagaatccaacggttggtgagacggcgttagcaccgtttttccggagttatcaagatggtaccttattggattatccagtcaagacgaagaaagcaaaacaaaaaccagttgcgatgtttgcagttgtgattcgctcgcaaaagggcttattatttcaaaaacgaccgagtaccggtttattagcgaacctgtccacttatccactagtcgctgcggaagacttgcaagtaactgacgatgaattattgacaccggaagaacaactagctcgtatcgaagcttattttaaagaggcttttgcgctagaattgcagcaattacatgaatcaggtttaaaacctgtggtgcacgtttttacgcatcttaaatggacaattacccttttagaagcacaacttgcagcagatgccgacctcgcctttttcccaggccaatggtataccgaggcacaattagctgacgttgcattaccgactgtgcaaaagaagttagcggcacgtttggcaaccaattaatggtagaaagttttaggtaaatttgcgagtctttgctataatgataggtgattatgaataataaccttggaaagctgggtatgtcgatgagtattcccaaagaaggcgactatatagcgattcaaagttataaacacgatgggagtttacaccgcacttggcgcgatacgatggttttgaaaaccagcgagaacgcagtcattggttgtaacgatcataccttagttacagagtcagacggcagaaagtgggtcacgcgggagccggcacttatttatttccataagaagtattggtttaacgtggtggcaatgattcgtgagggcggcgtttcttattattgtaatttggcatcgccgcatgtcatggatcaagaggcgcttaagtatatcgattatgatttagatgtgaaggttttccccaatggcgaaaaacggcttctagatgtcgatgaatatgaagcgcacagtgcgcaatggcattattccgccgaaactgatcggattttaaaagccaacgttaaggttttggttgattggatcaacaatggcaaagggcccttttcgaaggaatacattgatatttggtataaccggtatcaagaattggcgcaccgtcgttagaacactatttagtctcaagcaaaaaagccccagtcattgattgactggggcttttttgtatgggttaatcgttttcgactgaagtatcttgttgaatcgttaatgttttaaagccgatgccagcaccgatgctgatggatagcaaaagcgcgaagacgcaccagccgagtaaactaccagcaatgatgttgagtggcaagaagtggcgtaacagataggttgcaaggcagaaaagaatgccatcaaaaatgaagttagcaatcttaataccaagtgaacgttctactaggaagaaacttgttaccattttaagtgtttggttaggggctaagtcagccataatcgtcaacggtcgttcgattggaactttaataaataacattagggtgctgctgattagagcactgaacaaggtgcgatcccaagtggcactgtgaatcacaagactgtcgtaagccgttgcggcaatcgtaatgacgagtagataagggataatgaagaaaaataagtggacaagaagtgatttttgcttaggcatggtaacgtcctttctgttattaagctgtgttcattataagtcatttagtggtgaaatgacaattagtcagttaattttttaaccatttcttgatgcataatcccggcatctaggaactgtggtttggcggttgcttgaaaattaagctgcgtatagaacggtactgcacttaattgagcatttaaagtgagcgttgctttgcctgattcccgagcaaaaacttcagcggcacgcatcagttcttgaccataaccatgatgccgtgctgaacggctaactgcgacacgttgaacatgataatctgagtccgcttcgatgagccgcaacgtcacaacggcttgatcagcaacgtagccgacaaaataaatcgcttggtcttcgaattcatcaatctcaagttcaggaggcacgtgttgttcaacaatgaatacggcttgccgaattgccaaactatcttgataaaccgtactttttaaatcacgagtttgtttcactaacattaaaaaaccacctcttcaaaaggaataatcaatgtgtatcactataaaatttggtacaataacaataatcgttacactatgatagcataaaatgcgttttgtgtgacataggcacactggggggatactgcatgtttgatcgtttacgccaatcaaaactattattttggtcaattgagcttttgattttggctgtgttaatctttgtttgcaccaaaattagtttcttatttgatccaattggcacctttatttcaactttatttgggccaattattggcgcgggactattattttacctgtttaacccgctaatcaatctgttaggtaaactcaaaatatcacgcaactgggcgattacgattatcttcatcgtcttttttggcggtttaattttcattgtagccactgtgattcctaacttgattaaacaaatcacacagcttgtgacgaacctaccagattttgctcatcgactgcaaaaagtagcggatgatttatctagcaatccgcgtttgaaaaacattgacttcaataaatacgtcaatcagttagatttaaaaccatcgaagattgctgaaaaagttatgaagagtttcacatctagttttggtagtatgattggtgcgattacgagcgttacagttagtgtcttcacgattccaattatgttgttctatatgttaaaagacggacaccgtttagtgcctaatattcaaaagatgttacctgatcgttataacgaccaagtggcggacttgcttcggaaaatgggggcgacgatttcagcttatatcggtggtcaagctctagagtgtttattcgttggcgtctttacatttatcggttatctcattatcgggatgccatacgcttatttgttaggatttattgctggcgtttctaacgtaattccatacttagggccttatattgggattgcgcccgcgttgattatcagtttatcaatttcgattcccaaaacaatcatggtgattgttgtcgtcattgttgttcaacaaatcgatgggaacttgatttatcctaacgtgattggccgttcattagatattcatccgctaaccatcatcattatcttattggtcgctgggaatatttatgggattttaggcatgattttagcgattccgttttatgctgttaccaagacagtgattacttatttatatgatattcaagcgttacggactaaagctaaaaaagggaccgacctttaaaagatgcaggttgaatttccatttttgactatgctatactgcaaggtaggccatattcggctaaatgtacttatttagataatgaaaggtagtggatgtgacgatgaatcctgaccctggaagttcggtgtggggacagttactgttgatattaattttgaccttagtgaatgctttttttgctgcggcagaaattgcacttgtgtcactaagtcgtgtgaagatggaggagcaagccaataaaggtgacaagaaggcgcgagtattagttcaagtcttaggtcattccaatcagtttttagcaacaattcaagttgcgattacgtttgcgggcttcttatcttcagcgagtgctgccacaaccattgcgggtagattagcaccccttttaggaaatgcggcttggacaaaggaagcggccgtattaattgtgacgattgtcttatcctatgtatccctagtttttggggaattatatcctaagcaagttgcactgcatcgtgcagaagcaattgctaaaataacggtgcaacccgtgcggatcgtcggcatcttactgcgaccattcgtgtggttgctatcaatgtcgacctcgctcttaatgaagttgacaccaattgatttttcagaaacagaaccgaagctcacccgagaagaaatggtccacatgattgaatctgggaagagtgccggtgttctggaaaccgatgaatacgaaatgttagaggggattattaccctcaataagaagatggcgcgcgaagtcatggtaccgcgaactgatgcatttatgattgatatttgtgcagacaacgatcaaaacatcgatgccatcttagcccaaccattctcccgcattccggtttatcgggatgataaggatcaagtggtgggggtcgtgcatatcaagaatctcttgaaagaagcacgccaaaaaggttttcaggctatgcaaatcgaagcggtaatgaaagaacctctttttgttcccgaaacgattacaattgatgatttattatttgaaatgaaacgcacacagcaacaaatggcaattctgttggatgaatacggtggcgttgttggcttagccacgattgaagatttattggaagaaattgttggtgaaatcgatgatgaatctgataaagctgaagaattgtaccaaaaaattgatgcgcagcattacaccgttatgggaagtatgccaatcaatgaatttaacagtgccttcaatacagatattcaagtcactgatgtggatacaattgccgggttcgtgattactgaaattggtgccattccagtcagtggtcatccggaaacaattgagctgccaggtggcatgagattaacgacggggtcggtttccggttcacggttgattgatttacaattaacgttaccagaaccagagaccgatgcaccagaagaagtcgactaaattaaatgagcacaatcaatgggacaaagggtgacgcaatggttgcgcaattctttgtcccaagcgcattatattggaataacggaaaggattttataatgacacctactgaattaaaaacggcggttgatcgtcgtcgtacttttgcaattatttctcatccggatgctggtaaaacaacgattacggaacaactcttacttttcgggggcgtgattcgtcaagccggaacagttaaagggaaaaagagtggccaatttgccaagtccgattggatggaaattgaaaagcaacgtgggatttccgttaccagttctgtgatgcaatttgattatgacgacaagcggattaatattttggatacaccgggacatgaagatttctcagaagatacgtatcggactttgatggctgttgatgcggcggtcatggtcattgattctgctaaagggattgaaccacagaccaagaaattattcaaagtctgcaaaatgcgggggattccgattttcaccttcatgaataagttggatcgcgatggtcgtgaaccacttgatttgattgctgaattggaagaactattggacatcgaaggctgtgctatgaactggccaatcgggatgggaaaagacctccgtggcctttatgatatcgccaaccgtcgaatcgaactttatcgaccagaagacgaagccaacccttatttggcccttgatgaagcaggtcggattgccggtgataatccattgaaagaagattctgtttacacacaagcccttgatgatatcgaattgatcggtgaagcaggcaatgcctatgatgctgataagattgcaacgggtgaacaaacaccaatcttctttggctctgctttgactaactttggggttaagacgttcttagaatcattcgttaacttagcgcctgccccagaagcacacaaaacacaagaagaaacgttggttgaaccaacctctcctgatttctcagggttcatcttcaagattcaagccaatatgaatccagctcatcgtgaccggattgcgttcgtacgaatttgttcgggtgaattccaacgcggaattgatgtcacattgacgcgaacaggcaagaagatgcggttgaacaattcaactgaattcatggccgacacacgggaacaagtgacaagcgctgttgctggcgatattgttggattatatgataccgggaatttccaaattggggatacgattcacacgggtaaagaggctgtttcatttgagaaactccctcaatttacccctgaattattcatgcgcgtcactgccaagaacgtgatgaaacaaaagtccttccataaagggattcaacagttggttcaagaaggggcgattcagttgtataagacttacacaactggcgattatatcttaggcgccgttggtcaattacaatttgaagtgttccaatatcggatgcaacacgaatataattctgaagtattgatggatccaatcggttcaagaactgcgcggtggatcaatccagaacaattggatgaacggatgtcatcctcacgaaatctattggtaaaagatattcatgacgaaccattgttcttatttgaaaatcaatttgcagaacgttggttccaagataagtatccagacgttgaattaaccgcaaaactataatataaagagtcaaacaaaaataagccgccgattcagacacactaactgttgtctgaatcggcggcttattttttttaggggggtatttagtcaaaagttaggaggccttccattaaccattgacctgttttaagttgacaccagcgactttgattatcgagtacaacgacttgcttaacgactacccgtgttttaggcactatctgatatgttgtgggttggtcatacggtgcttgccaaaatgttacggtattgttgttcagacttgcactgaggtttagaggggttgtttcgataactgcgtaatggtaggtgaactttggtacttggtatgattcatcactgcctttaggattagtggcatgtaattgataacgcgtaggggtaatccaagaactgccaagattgaaccattgtttgccagatggagcagttgcacagctataaatcttccaaaccgcgtgctttggcaagcgagcagcagtcagcgcttcttcacttggttgctgataggtatccgttggctcaagaagttcgatgaagggctgttcaggtgcatcgctgtgttttaaattcagcggatcatatttaaaatggacaaactgtgtcttagttgtaaagcgaccagtctgattagctgaggtgtggtgcacgaagttagcaccaccttctagtggattggcttgatagtgttcgttcaaagcacctgataaaaattggggcttaatcaacaagccaccttctaaattctggtgtaacaccattactggtgctgcgagttgcggtttataaaaaagccagatagtggtgttttcttcaggaaactgttgttttaaattggtaatagctgccaagtaataaccggcaaattttagccatggcaaattgagcacggtacccacttcacctgtcagggtcatcgttggtcgtaaagggacccgatgatgatcgaggtagtgaatggtaactgtgctatggcgcggttgtgtggacatcgtagccagcagtggcgttgcgtcctgactaacgggaacgaccggctgtttctgtgacgattgaggcgcttgacggatgggctcttgctcagagacagtttggcgtacatgactgttcggtagaggagctgcttttttcgggcgccatttcaataacgattgaagcaggttaatcagattcatacggactccttgtagcgcattacttattactactagtctatcataaattacaaaaagtgtggttgataattaacgcgtcaagtgggcataaaaaagaacccctgcaaaaatagcagtgattctaatcgtttaaatatctaatacttgtaatttagttgcagtatgggtgacgcggccgatggaaacgggaattaaggaaacgattaattctcctgtacgtgaaatgacggcgcgttctagatgcccaccaaaaacgcttgtatctaaacgggcaaagcttgcatgtagatggacatcaatcgtgccatttgcattttcgacattcccactaagggccagcagttctacttgctcttgactggaagtggcaatatattgatccgtttctggtgaataaacgctgacggtaacttcatcacaggcaccaatccccgtgatagttcccagttggttggggaaggttgcggccaaatatttaagttctgttaggatttcgtcgcccacttctaaccggcaaataatttggtgctctttttgaaaagtcttcatcgcgtcattaatcctcctaaattaggttgaaagttattatacggtacgacctattcaattgccattattttgcctatgtaaaaaaccgccccaacaaaatgaaatgtcggggcggttcgaatgattaactcactgtttttgaaggtgttggaattgtaatttcgactaatggaccatcattcaagacttcaaggccatctgtggaatctaaaccggcgagttccttcaatacaaaatcgatctcggcttgttggacatgtcgatgatcattttttaaaaggagctcacgttccttcgatgaacgcgagtcaagaaccgttgttttaccaagtgaataaaccttaacgtaggttgcggctgttgcagcgagttgttgtgaaacaagtcgcttataagaattggttacattgattaagcgcatctaaatcactccctggatgtttaagtcttaccactagtataactgaaaacgcttcatttggcacgtaattcgttttaacttgagataataaagccttttaatctgtgacctgtgaatctttagcatcggtgatttgaatctgatcttccaccaaccgagccgtcaattgtttatgttctgggtgatcgagataatagtcagccacgcgatcttcaatttgttcttgaataacacgtcgtaatggacgcgcacccatctctggattgtaaccaagatcgacaagccgtgatttgactggttcagttacggcaatgtttaacccttggtcagcaatcatcgcatttgtttgatcgagcatcagactgacaatcttcaagagattttctttgcttaatggttggaactcgatgatatcatcaaaccggtttaaaaattcaggtttaaagtagttttgtagttggtttaaaatcgagtgtgtctgaccagaaagggttgccccgaaaccaacattggcttcggcatcagtttggccggcatttgaagtcatgatgatgatggtgtctttgaagctgaccgtccgtccttgtgaatccgtcagacgaccatcgtctaagatttgtaggaacatatgcatgacgtctggatgtgctttttcaacttcatccagtaagatcaagctgtatgggttgcgccgaacttgttcggttaattgacccgcttcttcatagccaacatagccaggaggtgatccaatcaattttgacacactgaatttctccatatattcgctcatatcaaaacgaatcatagcatctgtgctaccgaaaagttctttggcgatttgttttgctaattcagttttcccgaccccggttggtccaacgaataggaaagaaccgattggtcgaccggatttgttgaaaccaattcggttgcgacgaatggaacgggcaaccttatcgactgctgaatcttgaccaattacgtgcgcttcaagattttcagcaaggttcttcaactgtgcttgttcttgtgcctttaactcaccaactggaatgtgggttttttcttcaacgattttttccatatctttgtcggtgacggttggcatttcagattggtcaatggcacttgtttcgcgcatcttggtcaattttgtgacttgatcgcggtaataagcggccttttcgtaatcctcgtcctttaacgcactttgcttttcagcttccgcattttgtaatttcttttcgatttcttttggatcgacaacggtaatcgtcaagttcttcttagagccggtttcatcaagtaagtcgatggccttatctggtaagaaacgatcctggatataacgattagaaagggttgcagccgccttaagtgcctcgtctgtgtagtggacttggtgataggcttcgtatttatcttggagtccttttagaatttggactgtttcgtcaacagaaggttcattgactgaaacgggttggagacgacgggcgagggccgcgtctttttcaatttgtcggaattcattattcgttgtggcccctactagttggagttcaccacgggcgagggcgggttttaacacgttaccggcgtccatgccaccttcggcattaccggcgcccacaatttcatgaatttcatcaatgaagagaatgtattgcttattctgcttcaattcagtcatcagttgttgcatccgttgttcgaattgaccacgaataccggtcccttgaacaagtgaaacaacatctaagcgaatgacttgtttatccttaagtttggcaggaacgtcatcgtcggcaattttttgagctaagccttcgacaacggcggttttaccgaccccagcttcaccgattaatacgggattgttttttgttcgacggtttagaatttcaataacacgatcgatttcagcatcgcgaccgatcactggatcaatttggccagctttagctaagttggttaggtttacaccgtattgactgagcagactttcgccgttttgcccgttgttgccgccaccttggccgccactttgggtttgtggcccttggtttgcttgtaattgatcatcgggagttgcgcccattgctcggaagaaactattcaggcttccaaagccaaatggatctgcatattgcccttgtggtgcttggccattactgttttgttgtttcaagagttggtaacagttttgacaaagatcgatttcttgtcgttgaccattggtgcttgtatagagatgaatcgttgcaggattcttctggcagttttgacaaagcattaatctgtcacaacctttcattaataatagaatcgtcaaagtgttcttgactatctttgacctttatccaaattataatcatctctaaaaaaagttgcaagtcaggcaactcgaaaataaaagtttcttgtcaggtatgggcggtatgcggtagtatgaggtcatcgttttatttcgcagatggaatgaaaacgaatttttcaagccacgataaaagaattgcaaaggaggcagaatggcagatgcgtgattttttagcagagatggatgccttaataaataacgaacaaactgagattgaggttgctcagtccgaatttttagattttcagaaagtatgggtcaactatgaccatcgaaaagaaattgtgggcgaagcacaacgaaatggtgcggtaatctaccgcaagtctgaaagcggtatagtgtagacggctactaattttgttagcgaaactattgtagtattttaaaaaaaatggtaatcttaaatatcggaagggtagccactactagtgaccactcatttcgttaaaaactaaatctataattagataaaaggggatcgattaatatggaaaaacgcgattttcacgtagtagcagacacaggtatccacgcacgtccagctacattattagtacaaacagcaagcaaatttaactcagatgttaacttagaatacaaaggtaaatctgtaaacttgaagtcaatcatgggtgttatgtcactcggtgttggccaaggtgctgacgttactatctcagctgaaggtgctgacgaagcagacgcaatcaacgcaattgaagaaacaatgaaaaaggaaggtttatctgaataatgacaaaactaagagggattgctgccagtgatggtatcgctacggcgaaagcctatatgttagtgcaacccgatttgtcattttcgaaatcaactatttcagattcagaaaaagagattaatcgtttgcataatgccttacaagcttccacgagtgatctagagaccattcggaagattgctgctggatcattaggggaagaagaagcacaagtttttgatgcccacatgatgattttagcagacccagaatttaccggcgctatcgaaggtaaaatcaatgatgacaaggttaatgctgagcaagcgctcaaagagatcgcggatttattcgtggccacttttgaggctatgactgataacgcatacatgcaagaacgcgctgctgacatcaaggatgttactaagcgagttctcagtcatttattaggggtaacactccctaacccagcgttaattgatgaagaagtaattgtgattgctcatgacttgacaccaagtgacacagcccaattaaacggtaaattcgttaaggcttttgtgactgatattggtggtcggacttctcactctgctattatggctcgttctttagaaattcctgcaattgttgggactgaaaatatcacaacttctgttaaagccggcgaacaattaattgtcgacgggattaacggggatgttattatcaatcctacagatgcagacattgctgaatacgataagaaggcgcaagctttcgctgatcaaaaagcagaatgggaaaagttaaagaatgaaaaatccgttacaaaagacggaaaaacattcacagttgctgcaaatatcgggacacctaaagatttagatggtgttatcgataacggtgctgaagcaatcggcttataccggacagaattcttatacatggactcatctgaattacctagtgaagatgatcagttcgaagcttataagactgttttggaaggtatggctggtaaaccagttgttgtgcggacaatggacattggtggggataagaaattaccttacttgccattacccgaagaaatgaatccattcttaggctaccgtgctgtgcggattagtttagatcgtgatgatattttcagaacacaattgcgtgctttactccgtgcttcaaactacggtaagttacgtatcatgttcccaatgatcgcaactgtcgcagaattccgtcaagcaaaaggcattcttgaagaagaaaaagctaaattaattgctgatggtcaaactgtttctgatgatttacaagttgggatgatggttgaaattccagccagcgccgtcttggcaaatcaattcgctaaggaagttgacttctttagtatcggaacaaacgacttgattcaatacacaatggctgctgatcggatgaatgaacgtgtatcatacctttatcaaccatacaatccagcaatcttacgtttaattaagaacgttattgacgcttctcataaagaaggtaagtggactggaatgtgtggggaagccgctggcgattcagtcatggcaccactccttgttggaatgggcttagatgaattttcaatgagcgcaacttcggtccttcgggttcggagcttgatgaaacgtttagatacaactcaattaactgatttagttgaaaccgctgttaatgtgaatataagtaatgaagaaaaccaaaaattagttgaagattttatgcaaaatctttaattaaatggtaaaagatcgcccactgtggcggtctttttttgtgcgtaaaatttggatgagcaaaaaagattgacagttatcgattacaaatgtaaactgtaactaatgattacaaatgtaaacgaagggagaaaaccgcgaatgactgaaaaaataggggttattacggatgcggaatgggaaattatgcggatggtttggtcacttgggcaagtcaacagcagtcatttaattgaactcgttcagcaaaagcgcgattggcaagcgtcgactgttaagactttgctaggtcggttggtaaaaaaagactatctaattgccactaaagaaggacgccgatttatatatacggccaatatcgcagaagatgaagcgatgaaccatgccacgcagtcgctgtttaaccaattatgtgggatgaaaaaaggctgcacattagccactttaattgagcaaacaacgctcagtcaaaatgatattcagacgttacaaacggtgttagcggctaaattacctagtgcaccaacaatgattgaatgtgattgtttaccagccaattgtgattgcatagaggaggaagtaaaatgaaacacgatgaaatgcaccatgaacatgaaggacacgatatgaaagagatgcatcacgagcaccaaatggatcacagcatgcacgacatgcatcatgaccatgagatgatggatcatgatatggggcatatgaatcacgatatgcatgggatgcaccatgacatgggcgacggcgatatgatgatgcatggtggtcatatgatgcacatgggaaatctaaaacaaaaattctggatttcattaattgcaacggtaccaattctaattctctcaccatttatgggcatgcagttaccttttcaaacgactttcccaggttcagattggctagtattgattttagcaacatttctcttcttttacggtggggcaccgtttttaaagggcgctcaaggagaattatctgctaagagcccagcgatgatgaccttaattgcaatggggatcagtgtttcttatctatatagtttatacgcctttgttgcgaaccatttcttgaacccacaaggccacgtgatggactttttctgggagcttgcaacgttaatcgttattatgttgttgggacactggattgaaatgaatgcggtaatgagtgcagggagtgctttagaaaaaatggctgctttgttacccggccaagcacaagtaattgatcaagcagggcatcaacacgcggttgatttaaaggacttgaaaaaaggacaaactgtattagtcgcagctggtgaaaaagtacccgcggatgggttaattatcgccggtcaaagccaagtcaatgaatccttagtgacaggtgaatcaaaggctgttgcgaaggctgaaggcgatcaagtaatcggtgggacagtcaacggaaatgggacgttaaccgtgcaagtgaccgggactggcgaaagtggttacttagcgcaagtcatgaaattaattaaacaagcacaacaagaaaaatcaaaagttgaagggttagcagataaagttgcgaagtatcttttctatgctgcattggttgctgggattatcgccttcattagttgggtgttcttggccgatctgaatacggcttttgaacggatggtaaccgtctttattattgcttgtccgcatgcacttggattggccattccattggtggttgccagaagtacagcgattgcggctacaaacggcttgctcattcgtaaccgtgaagcaatcgaattgtcagataaggttaccgttgttttgatggataagacggggactttgacacaaggcgcattcaaagtgaatgctgtcgaagttttcgatacagcacttgatgaacaacgactcatgcaactctttggtgcgttagaacgccattcaagtcatccattggccactgggattctagagtataaccaagcacaaactattcctgatttacaggcagacaatgttcaaacgattcaaggcgtcggtttgtctggaacggttgcagggcaaagttatcaaatagtgacggcaacttatttacaagcccagcatattaaatttgatcaagctcttttccaaactttagcagaaaaagggaattccatcagttatctattacaagatcaaacggttttaggactagtcgcacaaggtgatcagattaaaccagaagcgccagctttcatccaagcattaaagaaacggcatatccaaccggtcatgttaaccggtgataatcaacaagttgccgaaaaagtggctgcacaattgggcggtatgacggttcaagcgaacttgaaaccagaagataaagaagcaatcgtcaaagattaccaagctaaaggcgaagtcgtcctgatggttggggatggtgttaatgatgcaccaggtttaacgcgggctgatatcggaatcgcaattggtgctgggacggatgttgcaatcgattcagcagatgtgatcctcgtgaagagtaatccaaacgatattatgcatttcttgaatttatcgcacgcaactaaccgcaaaatgacgcaaaatctctggtggggcgctggttataatattttagcgattccattagctggggggctatttgccggaattgggttagtattaagtccagcagttggtgcaatcttaatgtcactctcaacaattgttgtggctattaatgcaatgactttgaaattaaaacgagatgcatgatgtcaatctttttttaagcagtatgaagtagatttcgataaggacgggcgaaagaaaatatcgcacacaattagacgcacacaacatatagttgtagtgcgtctttttgttggtttatctactatatataggttgaatccgaatttttaatccgctatgatggggttactgattcaaaaggagactggtgctaagatggatatgaaaattgcttcagaagcagacttgcaaattaaagtgattaaaagagatgggcgaatcatgcctttttctgcggataaaatcgaacaagcaattattaaagccgctaaaaatgtgaagacggaattagagccattagactatcaagtgttaaacacagtcgcactagatgttgtgagtgaagtcggcagccgatttgataaagatgttaaaatctatgaactgcaaaatattgtggaacataaacttttagaacatcaccaatatgatattgcccaagaatacattaactaccggacgcaacgggactttgcccggaataaggcaactgatatcaactttaccattcaaaaattattgaaaaaagaccaaactgtggtcaatgaaaatgcgaataaagatagtcatgtttttaatacacagcgggacctaacggcagggacagttgctaaagcgatggggcttaagatgttgcctgataaagtggcgaacgcccatttaaaaggcgagattcattggcacgatttggattaccaaccatatagtccaatgaccaattgttgtttaatcgattttaaagaaatgttgaatcatggctttaagattgggaatgccgaagttgaagcgccacattcgattcaaactgctacggcacaaatgtcacaaattattgctaacgttgcttctagtcaatatggtggttgttccgctgatcgggtggatgaattattggcaccatttgccgaaaagaattatgccaaacatttagcagatgccaagaattggattgatggcgaagcaaaacaaaaggattatgcgcaaaccaagactgaaaaagatatttatgacgccatgcaagcgttggaatatgaaatcaatactttatattcatcccaaggccaaacaccatttacaacgcttggttttggattaggcagtaactggattgaacgtgcgattcaaaaagcaattctttcaattcgaattgaaggattaggtaaagaaaaacggactgccatcttccctaaattagtttttgcagtaaaacgcggcttaaacttaaatccaactgatccaaattatgacatcaaacaattagctgttgaatgtgccacaaaacggatgtatcccgatgttttaatgtatgacaagttggtggaattaacgggttctttcaaagcaccaatgggttgtcgaagcttcttacaaggctggaaaaacgaacatggtgaagaagtgaatagtggccggatgaatctcggcgtggtgacaatcaatttaccacggattgcacttgaagctgatggcaaccaagctaagttctgggaaattctagaacaacggttgcaagtctgcaaggaagccctggtctttaaagtggaacgcgctaaagaagcgaagccagaaaatgcgccgattctttatgaatatggtgcctttggcaagcgtttgaagaaaaccgatagtgttgatgaagtctttaaaaattcacgcgcaactgtttcattgggctatattggcctttatgaagtcggtacagccttctttgggccagactgggaaaaggatgccaaggcaaaagcctttacggtagacgtcgttaaagacctctataatcactgcgttgattgggaaaaggaatacggctatcacttctctgtttacagcacaccagcagaaagtttaacaaatacgttctgtcaaaaagatacgcaaaaatttggcattgtcgaaaatattacagacaaagaatactacacaaatagtttccactacgatgtgcgtaaggcaccaaccccatttgaaaaattagattttgaaaaagattatccaaaatactgttctggtgggttcattcattactgtgaatacccaaatctgcgtcaaaatccaaaggctttagaagctgtctgggattatgcttacgatcgtgtcggctacttaggcacgaatacgccaattgatcaatgcttcaaatgtgggtttaaaggggactttaagccgacagaacgcgggttccaatgcccacaatgtgggaacacggatgctgctacatgtgacgtcgttaagcggacttgtggttatctaggtaatccacaacaacgtccaatggtgcatggtcggcataaggaaatcgccagtcgagttaagcacatgcatattaccattggcaacgataataacaacgttgcacggcagtaattgtgaatacgggatttgaaggagtttttgaagatggcagtaaaacaacaaggcccgaagaatccggcgcccaaagaatggctttctgaaacactaagccaggattatattgcagattataaaccgtttaactttgttgatggcgaaggggtgcgctgtagcctatatgtgagtggttgcatgtttgcttgccccggttgttacaatcgagtggcgcagaattttcgctatggccgcccttatacaactgaattagaagaccaaattattgctgatttagggcaatcttatgtccaaggactgacgttattaggtggcgaaccgttcttgaataccaagacttgtttatcgctagtagaccgaattcgcgccacttatgggcagacaaaggacgtctggtcatggacgggatatacgtgggaagaactgatgcaagaatcagatgataaactcgagttgctgtctaagattgatatcttagttgatgggcgcttcatgaaggaccaaatggatctgacattgcagttcagagggagtgccaatcaacggattatcgatgtcaaaaaatcattagccgctaaaaagcccgttatatgggcaaagcttgttcattgaaagtaatatgtaaaataaagttattaaaaatttaatttttattttccgtcattggtatatacctaacacggataaaaaagagcgtcaatccatgattagaatgggttggcgctttttttagtttttgtgaaaaactggacattcataggtaatgaacggggttatcgtttgacaacgctttctgtaacataatacttgtaatagcaattattttttaattatgattcaggaaaaggagtgaggttaatggattcatttatcagtttcatggagaaacgctttttaccagttgcggcaaaagttgggaatcaacgacatttgccattcgtgacgccttcgtaacaacgatgccattgatgatcttgggtgcttttgcaaccttgattaacaatttaccaattccggcatataccaatttcatgaacagtgtgttctcaaagacagttggtaagggcgctgaaaaggcttatatctggactaaattcgggggcaatgcttggagcgggacatttgcgattctttctgtgtttatcgtcttcctagttgcttacaatttaggtaagtcatataatatcaatccactagcagccggcgtaacagcattagggtcattctttgctgttggcggtcttgcagggatggactcaatgggcttgttcgttgctttaatcgttgcgatgatttcaacagaaattctcagacgtttattgggtaataaacacttagtcattaagatgcctgatggggtaccacctgcaattacagctaacttaaatgcgattaaagctggtaaagcagcaccatatattgttaacaaaccattctttgattcatttgttaacttaggtgggactggtgctactttaggcttaatcattgcaatctggttagtgggtcgaaagaataaacaatattcaatcgttgggaatttgagtgccgctcctggggtcttcaatattaacgaaccattaacatttggcttgcaatcgtattgaacccaattttattcatcccatatattgccacaccaatggtgatcgttacaattgcatactttgcaactagcaccgggttagtgcccgctgcaacggttatgccaccttgggtaacaccaccaattatcggtggggtcatcgcaacggttagttggcaaggtggggtattagcagcagtgaacttacttgtttcagtgctcatttacctaccattcatcaagatcgccacagacatggctttaaaagaagaagcagcccgcgatcaagcggcttaagcacaaaaaaaggtccgacatgaatgtcggaccttttttttgtgcctataattaatgagttgactcacttgcaatggtgacgtgcccgttttgaacgttaccaatgacgatattgttcgaaatctggccagcggttgcatcggttagatagttgatactatcactcatcccgacaacagcgggacctgctttgaccgtaatggttgaagctgattcaccaggcttttgttgatcaagttgctcaaaaatggtttgatcagtctgtgataaatcggcagcagctactagtgagtccgtcttttgatagcttgttgcttgaccagcaccgatgcgtagcagttcatgatcattcatgaagaggtagagataaccgatactatcaccactagcaatcgacttaggggttaattgataaccagcttgtgctgcatcccttttttgagcagcatagattgtattttgattgagcgttactaaagtgtatttggcaagatcttgaatggcagagcgttcaatactattataacgtttttggtacatgaagccatctttgaccatcagttttccggtgtcattagcactcgtcgttgttgcggccgcaatccaagtgccattgagttggtcgagggcaacaggactggctgttgttttggcggttgctttttgactgacgaataactgtccgcggtcaaaattggtgggggtttgtagatctctgtaatgagctgtaattgcgtataggcgatttcctttggcaacgaatccctggtcaattgtatttttcccagtcttagtctcaagaaagacgagatctgagaggtgtttaatcttaaagtcagcccccaatttgtgtaatgcagcgttgacttgtgccacagtcatcagatggagtgtcttttgatagctcttcatcagatgactgcggctatcttgttgccattttttaaacgaaatttgttgataattaatcggctgacttgtgaaggtgcctttagaggtcagccaacttttaggagtggtcatttgagcaatatttgaaacagtgatgtcatcagaaagaccgtttttagtttgcttagaaaggagttgtttgttaaacaaccaagtctgtgaatcggccgcgagggcttttttagttgttgtccggttggcgtaggtcgtcatagttggctgcgcgcgggatgtggttgatgaagccggttttttagcttggcaacctgctaggagtgttattgttaaaagggtagtgattaaaagtgttttacgcattttgaagctccgtttcatttgtctgcaggatgggttttgccgaataagccgtcatcgtcatccgtgttgtagtaacttaaaaaaggaaagagtagtttaaaagtggaaccactgccttgttgggagctaacggtgagttcgtgaccgagcttttcacttaaggcacgtgcaaggtagagccctaaaccggttgaacgttggttagaatagcgcccattttgaccggtgaaccctttatcaaaaatccggggtaggtcttcagccggaatcccaatccctgtatcgatgacacttaaccaaacgccttgttcgtcacgttcaatctgaaccgtaatttgtgcgccatctggggtatattttaacgcattggaaatgatttgattcaaaataaaagccagccatttagcatcggttaagacggtttgatcggcaccaagcagtttaaattggatgtgtttttgaataaaataattgcgattttggcggatgatttggttgactaaaggtttcaaatcgtattcctgcaccaagtaatccttagaaaaactatcgagacgcgagtagtagagcacttgttcaacgtagtgttcaatttggatcagttcatcggttaattgattgaatttgtcttctggaatctggtcttcgatggattcaatgagcaattgagtagctgctagggggaccttactttcgtgcacccagccatcaatgaaattcttttgatcttgttgcgctgagattagtcggtcaatgctttgttgatgataggctagcagttgattcacgtagtgttgaatgaattgtttttcagccgaggtagcgcctgtaagtggccagttgaggctatcttctttagcatctaagcgtgtttggattgtgcggtaccacttgagatggtagacgtataagccaaccaaaaaggcgcagaaaaaaagcgccagcaataaatcgaggtataaaagtgtcgccttagcaaagcgcatactagggtcgagccataggacgatatccagaacaatcataccgctgaagaaaaaagcgatatgaaataaatgatcacgtaagaattttttaaacgtcataataactccttaggggatgatatagccttggccaattttcgtctgaatgtagtcttctaaaccagcactttcaatttttttgcgaagccgattgatgttaacggttagtgtgttgtcgtcgacaaaccgttcatcgtcccagagggcacgcaataacttttcgcgactgacaatctggccgtgttgacgcatcagaaattggaggagcttatattcgtttttggaaagatcaatggtagtctcacccacctgagctccgccgctttggaggttaatcattaggccgttatgttcgatgatatcggcattttggtcgacgtagttgtaagtccgtcgtaagagggcgttaattttggcaattaaaacttccatcgaaaaaggtttattgacgaagtcatcgccgcccatgttcatcgacatcaccatgtccatgttggtactgcgactagaaatgaaaattatggggactttagatacttcacgaattttgcgacaccagtagaacccgtcataaacgggcaggttgatatcgagtaaaatcagatggggtttattggttaaaaattggtcgaaaatggtatcgaaatcggtcgtaatatttgcgtgtaattgccacttatttaagttctcagcgattaagttggcaatcgttggatcgtcttcaacaatcataatttcaaacataatgaattctcctcatacatagatagactaatattaaccactttcactagaaaagacaaccaactaaggtcgtagttataaaatgggcttttgcggtcaactctgctaaaatgaataccaattagttaagggatgtgaaaaaatggcagtcgtatcagtccaacaagtttcgaaagtctacgggcatcggtttagtctggtcaatgcgcttaataatatttcatttgatattgaaccgtgggagtttgtcggtattatgggcccttcaggcgctgggaaaacgaccttattaaatatgattgcgaccattgatcggccgacgcatggtcaagtgttaattaaagatcaagttgtgagtcggatgcgggaagctaagcttgctaattttaggcggcaagatttgggctttatttttcaagattttaacttactagattcactgacggttcgcgaaaacatgttactgccattagcgcttgataagttaagtgtgccagtgattgaaaaacggttggataaagttagccgagtcttgggcattagtagtttgttggatcgttatccggatgaagtttcaattggacagcgccaacgagtggcatgtgggcgcgcaatgattaccaatcccactttgttattggccgacgaaccaactggaagtttagattcaaaatcagctacggagcttttacaatatttaaccgtgattaatcgtcaggaaaagacgacaattttattggtcacgcatgatgcctttacagctagttactgtcggcgaattcttttcattaaagatggtcaattattctcggaaatcgttcgcaatggtgatcggcaacaattcttcaatcaaattattgatatgcaagcaaccataggtggaggaggccgtttcaatgctgttacacctaaccgttagaaatgcgattaatcatgcgcgcgactatgcggcttatgtgattgcctgtgttgccgcgattgtggtttatttctgctttacgtcgattcaaactgcgccaatctttaggcacctcaagatggctggtgaatctttagcttttggccggatgatccaagtagcaggtttaattattttgctgtttgccgcttttttcttggcatatgctaatttatttttcattaaaaggcgtcggcgggagattggtgttttaagtgtcatcggggtgactaaatttcagattagcttactcttcttctttgaaagtttgattatcggtgtgattgccctgattatcgggttgttattcgggattcttttttcgaaattattcgcgatgttattattacgcatgatggggattgcggttgccatgccgtttttaatatcatggcgggccattgaacaaacgacattcacctttggcgggttgttcctattaactggttttttaaacagtacgatgatttatcggtatcaattagtgacattgctgcaaccatctgcagtcagtcggaaagtgcgccgaccgaactggctgacttatttatgggggattattgcacctgtattgattatcagcggctattatttggcagaccaaacactggttttgatgccgagcttagagcggcgctatggttttgggattgatttggtttatttactaaccattttattacttgaaatttttggcacactggctttttttcaggcctatacgcaaatttggctacagttagaacggcactggaaacggctttattatcgtgggacacatttgttaaacgttacgaatttgagttttcgttttaaaaagaatgcaaagatgttgtggatgattacgattttaagtgcagtcactattaccgcaatcggaagtgcggcgatgatttatacgcacggtcaagatacattacggcagaacattccggtggatttggtttatacacaaagtcaaaaagcagcggtcgacaaaattttaacgcaatatcatgttcagccggttagtcaaacaatgtcttcgtttaaattggtggatgctcgatttaaggtcaattcaccgttaaatcgggaaggcatcaaaatggatggagcagctgttgtcatgccgttatcccaatacaaccaagtaatggcgcaacaatttaagttaccagcaactaaattgaagaaaaatactgtggtgaccatcattaacttgccattaacaatgctgaagatgcctcgcagagcaggtgcaggtttgccaccgaaaagagctggaatcccgttgcaattaaaacagtctgggctttcagattttcggattgtacacattcgtaagctatttccaaacggttctgatgtcttctttgatggtaacttaaacgtgattgtggccaatgatgctgaatatcaacaagtccaagcaacttcagttgatcaaatctatgcagttcagctctccgctgcccaacaaaagcaaaaacgattaatgcgcgatttattccgtctatctcaaaagcccaaacaatgggattatttaatgacgcacaaaaaagccgggcaaacccattatgaaattaaaaccactgatcaacggctagaagagttaagccgctattctgtgcttttaaaaaaacctaaccgagatattgctaacgcaaacttcggattttatatgtatgtcgccatttttattgggttaatcttcatgttagccactggtagtatcatcatgttgaaacaattgtcagaagcacaagaagagattttgcagtataaaacattgaaaaaaattgggatgagtgacggtgagattaagcgcacgatttatttccaaattttgatgctctttttactgccaattattttgggatcgatgcacgccttctttgcaattcggttattgggtttgtttttagataatcctgggttacaattagcctatatcgtttgcggcctgtttatcatcatttactttgttttctatctaattacggccaatatctacaatcgaattgtgaatgcaccgctcaatagtgatgtgttctactaaactcggagggaaagtttttgcaattagctatgtaccgcgcaaaagcgcgtcaattattaaaaggaaactggcagaaaatggccgctttagtcgcgctttggttgttagttgagatagtagtcgactcaatgattgaaggcgtgtttggcgccagttcatttggttatcaaatgctcaacacctttgccaattatttcttatactttatctttttaaatgctgttttcttaggtgtttataaagttagccagaataagcccagctattaccgggataccttattgttattccggcaaccgttgtatacccatcttgtggtattgaatcttgttcaacaagtgttaaactggatcttactattaattgggttggcgccgttttatcggttactcggttgggatcgtgtatttcaattcacttttaatggattagattccgttgcgccttatttgctaaacattagccagcaggggacaatttctgaaactgtcttattgtttgtgacggtgatgttggttttgtcactgttgcaacccgtgattttaacgtattatcagattttagtactgttgaagtttgatttaccacaagcaccactcaaattaatctttagcctttcatgggtgattttaaaagggaactggctgaaattactcgggcttactttatcatttattggatgggaactggtcgtctatatgactgctggactaggtctcttgtggttctatccatacttaattatgagcgttacgattttctatcaagaagttaaagctaagaaagtccaagtcattcaatagcattagggccgccatccatttgggtggcggtctttttttatttagttagtaaatatagtgcgcgcgatacccggaatgcgctactatagaaattagaaaggtggtcatttaaaaatgcaattaacagtcttaggttattacggtggatatccatacgccggtgttgggactagtagttatttattaacaagtggggcgtatcatttattgctagattgtgggagtggcgctttattagcgcttgagaaacaatttgacccattgcaactagatgtggtccttctcacgcactatcatcacgatcacattgctgatgtgggggttttacaatattattggcaactgcatcaaggaaccaaaaaggaacccattttacctatttacgggcatctgcaagatccactccactttggcagtttgacacaaccgggtgtgacgcagggctttggttatcaagaagacacagagctgaccctggggccgttgaaagtaactttcaaacggacagtgcatcctgtcccagcattcgctgttcgaattgaagaacaaacgacggggcaggtcttggtctttactgcagatacggcgtatttcccagaattagctgctttttgtcagtctgcagatttactgatgactgatacgaattttcttgaagatcgcactggtaaaatggcgcatatgacaacaacgcaatccggtaacttggcacaagaaagtggcgcagctaaaattctattaacgcatttaccacaaggggtttcggcagaaacgctacaggcacaagcacaagcgactgttggggacgtacccgtgatagttgcccaacaggatttgacaattgatgtcggagcgtgtaatataggcggcgttgatgaaacttacaaaaaataagtgaattttcattagaaagtagaaactactataattttttttgaatgataaatataaatgtaaaaacataaaaattaatggtgagtgggaaaatttaataataaaccgttttaattagacgttttatgtccaaatgtctatttattaattattaaaaaataattaataaatttaattttagggtagttttctagtgctgactcgcgtataataaaatttgtaagagagaaaatgattgtcttattgttaagtaaggtgtcatgttaataaaggagagagacatatggttacgttatatacatcaccaagttgtacatcttgtcgtaaagcccgggcgtggttagaggaacacaatattccataccaagaacgcaatatcttttcggagcctctcaataaaaatgaaattaaaacaatcttacgcatgaccgaagatggcacggaagaaattatctcaacgcgttctaaggttttccaagaattaaacattaaaattgatgacttatcaatcaacgaattattagatttagttcaaaagaacccagggctattacgtcgtccaattattttggatgaaaaacgacttcaggttggttataacgaagatgaaattcgtcgtttcttaccacgtgaagtacgggcattggaattacaacaagcacaattactagcaggattctagaggagagtcggggctgttaacagcctcgacttttttgatgggttaaaaaattaattgctgcgatgtagatacttgaatgttacgccagatactggtatggtaggtcaaagaaagtgaattacgacgctataagaagcgcgttagaaaggggcgttgtcccatgagaatggaaaaaatcgacgagaacacaattcgggttctattagaaaatgatgatttagaagaacgcgggattactggacttgatttgttgagcaatcataaaaagattgagcggttcttctattcaattctggaagaagtggacagtgaacacacatttgcgaacaacgatgcagtaacgttccaagtgttgcctaacgatcaagggttagaattactgattagtaagaatatgccaaactttgacggtggtaaaggtcaatcagaaatggtgcaaggcaaagacggtattactgaatacattaaagaacaactgttgaaacgagatacggtccaagatgatgcgactgaggaagaggatgaaatgaccgcttatatgaatcaagcggacaatccaatgaaacagattgtgttatcgtttaagtcatttgacgattggattgctttggcacaacagctacacatcgaaagtggtgtgtcgaacctatttctttacaaacatcagtactatgcacagattattatttttatggagaatacgaccgaagcgtttgcacgggatgatttagcggtcgctaatgaatacgggcagaagtcagaatacacagcagcttttttaagtgaattcggtgaaaaagtcatggataatagtgcgcttgagttaacacgctactacttcaaacattaaaaataacgggttttcctaaatttaggagaacccgttatttttttgcgtattttcggtgggggtgataaataatgaaagttgcacagaccactaacgggtgcttaattcgcgccgatcaagcagccaaacaacagcaagtagcgcggtatttctgtccacattgtcaacaactggttcagttgcatcgtggggtgcataaagcaccatatttcgcacatatcgcagaacgtgtatctggtggtggtgagagtccagcccatctggcgggaaaacaggcgattgctgaattagcacatgcgttgggctggcatgctacctttgaagtacctgtcggcgagacacagcgcgctgatgtatggttaacgcggaatcagcaaccattaattattgaataccaatgcagcccattgacgccagataagttaaaccaacgaacaatcggctatcagcagcgccgattacctgtattatgggtggttggtgaacggtattgttttactaaccattatttaagccagcaacagttggggtttatcaactatcggcggcagtggggcttttatgtggtaagttatttgccaaagtgggggcaatgggtgttatatcaccatattgtcgcccgtgattttgctggttatgcttggcaaaccctgcgattgacaactaaggcgtttgtgcgcttgcttgtagcacaaacaagactgccagccaatcattataagggcaagtcacagcctatgcagcaacaaattattgaccgtcgattagggctgcaagacgcacattatgttgcgttacaggcggattgttatgcccaccatgaacgcttgcaagccgttccggactggtgttactgcacacgtaatgtaccacccatttatcagctcagtcagtttgaaagtcgggtaacgtggtggttgagtgcccaaccaattgatctttttttagcggtaacgcccttactccaacaaccactactaaagcaatccttatttgcacaatgggggcaaatagctttgaaacaagcattaaaaaagaaccgggggtcggttgaccaccggttctaagattaagaaataacatgcaaagcaacccgtgagagggtgcttttttgtttttgaagtgcttggaaagtctgttcaggtgttgtttcagcacaacaggcttgtttcaagagttcataggaatcgcaattttcaatcaataagcctgattcgctttcaccttttgaatagttgaagactactgctgaaggggtcatctgaatgttcatctcacaagataattgttgatctgaatcaaatgcctgtttagtaagtggactgtgccaatcttcaagtaacatttcggtatcaagtcctacgcgtttagcaattgtaaggactaattcgttgttaagttccatatctggttcacggaatgcttgttgcagttgcattaaaaatgattggctcttcttgcccccctggaacgttgctgccttataagcgagtactgcttcataaatggtgctgaaaacgtgattacgtaagtttaaatcatgactattttgttgctgaaactgcatgtaatgctcgacgttttttaagtttaagactggaataaacttaaaatgaatatttgcatcggtttcgccgataatctttaaaagtgcctcttcggaacgtaaacaaagttgcccgattgggttgataaataaaaacacttctaacaagttggttcctccaaaatttctatattgtatatactgctcgacgcgcttgtactgtctactctaacaaaattttaaaattatgcaataagttagcttgacagagtttaagcttgatggataagggcgcgcataattttattgggtggtatttgttcacttaattgatagcgggtgacaaatgatttaaaccaagttgccccttcttggacgttggtgacttcaatttcgacttcataatcctgggtttcgtcagggtattgggtaacatcaagcgttaacaggccagcaactaaagacgcggtctggcggtgcgttgttgcctgtccccagatgaacaattctttgataatcacggcttgtgctgcaaaatagacagcgatctgaccagacgataatacggtttggtgctcaattaagtgagtagcctgctcaagtgttaggcgatcagtgatttcaatcagactatgagcattttctacggttggcacctttagcgtctgttcggcataggtgtcaaagagtcgaatacgcaacccccagtgacgtttagccaatccctggttaggcagttcgaagtaataattagtttgcacaaacggcgctgcaaatggatagtccgcttttagttgcgaaaattgcgccgccgttagcatcgtcttaaattcgcgttcaatcgtttgtgacatcggttgagctcctttttaaaaaagcaatgttattatcctagcacaaaaaagcagacttgtaatgaaatttgtatttcagacgattattatttattcaattctaatctatgttaaaatagtgctgtatgtgacagagtgaatgaggggtttataatggtcgaaaattggaagaagtttttaatgccttatgaacaggccgttagcgaattaaaaattaaattacgtgggatgcgcaagcaataccaacaaaataatgaacatgcacccatcgaatttgtaactgggcgcgttaaaccaatcgatagtatcaaagaaaagatgcaacgccgctacattacagaagatttactcgaacaagatatgcaagatatcgctggtttgcggattatgtgtcagtttgtggaagatatccatgaaattgtgggccttttgcaccaacggactgatatgaaaattgttgaagaacgggattacgtttcaaatgttaaaccaagtggttaccggtcatatcatattgtaattgaatatccagtccaactaatcagtggtgaaaaattgattttggccgagattcagattcgaacaatgtcgatgaacttttgggcaaccattgaacattcattaaattataaatatcaaggggaatttcctgaaacgctgaaggcgcggcttaaaagagcggccgaagcatcctttatgttagataaagaaatgtctgaaattcgtgaagaaattcaagaagcacaacaactcttctcatatggaaaatggcaaaacgcacttgaaaaggcaactgaaaatgattctgaaggagagacgccagattgaaagtaacggtatttagcaatgacggtagttcttccgttcaagttgccaatcgcttaatgcaaaaattgatcaatacggggtttgtcattgatgatcaaacgcccgatgtggtcatttcagttggtggagatgggacgcttttatctgcctttcatcggtacgcccacgatttagcgcacatccggtttattggcgtgcacacgggacatttagggttttacactgactggcgcgattttgaagtcgatgatctagtcgtcgccttgcaagaagatctcgggcagagtattagctatccgttattagaagttaaaatcgaatatgcggatacgcacgaaatcagtcgcagtttggcgctcaatgaagtgacgttacgtcggtatgcagcgactttgcggacagacgtttacattaaagagaatttttttgaaagttttaggggcgatgggctctgtatttccacaccaactgggtcgacagcttatagtaagtcgattggtggcgcggttttacatccacgcttagacgcgatgcagatgaccgaaattgcgtcgattaataatcgcgtatatcgaacactatcggcaccaatcgtgttaccatcggatgaatggttgctcctgaagccttctaagacaagtgattacgttgtgacaattgatcaattcacatttaaggatcgaccaattgcctcgatgcaatttaaaattgcaaaggaaagaatacagtttgcacgttatcgacacacccatttctggaaccgtgtcgaagatgcatttattgggtcaaaacatgaaatttgaatggcaatatcaagatgcagaaggctgtgtgttgcggaattttttacggcggcataagctttctcgcagtcagttaactaaaattaaatttgcaggtggcacaatcctcgtcaacggccaggaggcacataccaatgcccaactggttcaaaacgatgtggtgactgtttacctcgcaccggaagtggccgtcgaacacgtcatcccagttaaaggggacttgaaagtggtttttgaagacgaccattttttagtggtcgataaaccggcgtttgtggcgtcgttaccggcaccgaaccatccgcacaacacaatggccaatttcgtcaaacaatacttgattgaccaaaatgctgagagccaggcagtgcacgtagtaacgcgcctcgatcgcgatacaagtggtttgatgatgttcaccaagcacggcttcgcgcatagtttgttggataagcaactccaatctaaagaattgcaaaaaacatatgttgcgattgccagtggtgatatgcggttagattatccgcaacatgcgtggattgatcggccaatcaaacggtcggatgatttttacatgcggcgggtcgttggggttggtggcaaacgctcattaacggaatattggcaagaagcccatggcaccgatgccacgttagttaagttgaagttactaacaggtcggacacatcagattcgggttcattttgcatcactggggcatcccttaattggtgataatttatacggtgtggccgatgatttattaccgcgtcaagcattgcactgtcgcgagttaacgttctatcatccatttgaagaacggtatgtcacggttcaaagcgaactaccagccgattttcaagcagtgatggatcaacgtcatttggcttttcctgcgggcgaattgaataaaatttgattaagctttcaatttgagtcgcaatctaactttagaatgagtatactaataaacgattatggattacggagggattagtattgtgttaactttaaatatgattaagacaatcattttagggattgtcgaaggttttacagaatggctaccaattagttcaaccggccatttagtgttggtcggtagtgttttgaaacttgatgaatcaaaagcattcatcgatatgtttaattatgtgattcaatttggagcgattatggcggttgtgattctatacttccataaattgaatcctttctcaccacgtaagaaccagctcgaacaaaaacaaacgtggacgttatggtttaaggtaattgtggcggtgattccatcagtcattattggattcccattgaatgactggatggatgaacatctgatgaaaaactggattgtggccagcatgttgattttatacggggttttgttcatcgtcatcgaaaatcgcaacaagcataccacaccgaaatttgctgatttaaatacgttaccttggttgacggccttttggattggctgtttccaagccttatcaattattcctgggacatcccgttcaggcgctacgattttaggggcaattattttagggacatcacggtttgtgggtgcggaattctcgttcttcatggcgattccaacgatggtcggcgtggcaatcttgaagattggtaaattcttgtaccaaggcaatacgtttacgggcgatcaatcaatcattttattagtcgggatgttggtttcattcatcgtttcaattatttcaatcaaattcttgatggattacatcaagaaacatgatttcaaggtcttcggttggtaccggattatcttgggcctacttgtcttaggtgcaatgctatttgcataaaggattaaattaaaatttggagggttcatccatgttaatcaaagaagtttgtgttgaaaatttcactaaaattccggcagcaatccgcaatggtgctaaacgaattgagttgaacgacaacttggctgtcggaggcacaacggttagccggggtgtgatggctgaatcagtgcgttatgcgcatgaacacgatgtaccagtgatggtcatgattcgtccgcgtggcggcaactttgtttataacgatcaagaattaaaaattatggaagctgatatcttttcagcgcaagaattaggcgctgacggcatcgtccttggttgcctaacacctgacaatcaaatcgacgaagaagcgatggaaatgttgattggtgctgccaatgggatgcaagttgttttccatatggctttcgatgaaattgcggctgatcaacaagctgcagcaatggaatggctgattgatcatgatgttaaacggattttaacgcatggggggccgttagacgcgcccatcgacgaagcccgtttaaaaacgttaattcaagctgctgatgggcggattgtgattttacctggcggtggcattacagccgacaatgtcgacgcgttaacagaacgtttacaaatttccgaagcacacggtacaaaagtggtcgggacattataagatagtaaaaggcccagtcatcaatgatgactgggcctttttttaatgtttaaataggagataatcgactgacgacgcactctaaacgtgttcacccagtcatctctttccggttagcgacgattgtcaaacgattgctttcagcaatcattcgccagtctaggctaatcctcaagagatacccgactgggatcacactctaaacgtgctctgtaaggcatccgcttccggttaaccctgagccgcaaacgattacgttgtaatcattcacgacgctgtgttaatcctcagcggatattcgccttacgacgcactctaaattttttctatcgctaggacttgtccttggtcggcgttgattgccttgtagtgggttacttggtaattggttggttctaggcgacttaagtcggcgattagatagtcgatttcttcttgagtttcattgaaccgaggatcaacaacgaataccagtaagccaccgcgattaagccgtgagagaatttgatgataggcagagattgtcgtgttaggcaatgtcacgtgttcaaaagaatcaggactgagtgcgcctaagctaaaaatagcggcttgcacttttaactcgggtggtaaggcagtgataatccgctcgtgtccttgattaagcaaagtaacctggttcgcttggtttgcttttgtaagacgatccgcgcaggtttcgatggcttctttttgaatttcgaaaccgtaaacctgaccaaaatcagcaacgcgttctgctaaaaataaggtatcatcgccatgccccacggtggcatcaattacgacatcgccgggccgaattgcctggtctaatagaaaatgtgcaaatttagtgggatgatcaagtatcatgtgttaggactccttcagatgcaataatttaaaatgaataaaacagtaccatgaaccgccgagacacgccgttgctaataaaaagccagctaagacatcactcggataatgaacaagtacgtaaatccgactaaggccgatgcatagtgccaatattaaacaggtgccaatcgctatttttcgccaaacgcgttgacgaattaagtagtaaactaggatgcttaaagttccgaaaaaaagaagtgcccccgaagcatgaccgctagggaagctgtagccgcctgcgtagacaagatggtgaaatgggggccgtggtcgttggacgctcatcttaataaagtggttaagcgttgaaaaaaggaccatgttaatgactaaaaagctagctgctgaccactgtttaaagcccagcaaaccaagcgttacaatggtggtcaaagtcattatactatagggattgccgatcgacgtaatcgcaatgcttacagtatccatcaatggggaggaaagcgaccggatgccagttctgataagggtatcaaaatgtataacccaagtggcatggtgcacaacgctgattaaaatgattagaaaactgattgtgccaagaatgaataaactagccgaaaatcgtttggtcatttttaagaaatcctttcaaaataagctgtaattaaagacaaagaagattattaaatgatacaataattattaggcataagacaactaataaaagtagttgcgtgataggattgttttccccatttattaatattataataaagttcaggtgaagctcaagttaattgtgccacagacaataataatggaaattcggaggcgttagaattgaaagagactagaaaacagcgaattgcagctcaaaaggtaagcttacataagcagaagcgggaaattagaattaagaaagttcgtaatgtgacgacttttgcaggggcaaccgtcttgatgggttcagcaattgcacctagtttttcgaatcgggccaaagcagccactgaagatgtgttaaatagtgcaaacaatgatgaccaagctataacagctaatacagcaagtagtgcaacatcatcaacaactagttcaagcacaacgacaactgaatcccaatcaacacaacaacctgttgtaaaacctcaattgactgaaaatgaagcgacaaaggtggctacgccacaaccggcaccatctcaagcgcaaccaatttctggagtgcaaagtacgagtgccaatatcgcaaccgctggcgttgttatggcagtagctaattcaagcgcacaaaatttcatcaattcaattgctagttcagctcaacaattagcgggtggtaacgatttgtatgcctctgttatgattgcccaagcatcattagaatcaggatttgggagcagtggtttaggttctgcccctaattataacttgtttggggtaaaagggacttacaatggtagttctgtttatatgtggacttgggaagatgatggtcatgggaacatgtatcagatccaagctgcatttagaaaatatccttcatactaccaatcgttacaagattatgtgcatgtgctacggaatacttcatttggtgcaacgccttattatcaaggggcatttaagagccatacaagtagctatcaacaagccacacaatacttacaaggacgttatgcaacagcaaccaattatgcgtcaagtttgaaccgtttgattcaacaatacaatttaacgcaatatgacacgccagggaccaatactggtaacaataatgggggaacaacgactccaaccacgccaacgactccaacgacacctgaaaatgggacaaaatacaccgttagagccggcgattctgtttgggggattgctaatcggtatgggatttcaatgaatgacttgattagctggaataacatcaagaacaatatgattcacccaggccaagtcttgattgtttcaagtagtgcagctggcaacaacaatggtgggacgacaaacccaacagaccctacaacaccaacgaatccaacaacaccagctaatggtgataagtataccgttaaagccggcgactctgtttgggcgattgccaacaaatatgggatttcaatgaacgatttaattagttggaataacatcaagaataatatgattcaccctggcgatgttctaacagtttcaaaaaccgcaactggcaatacaaataacaataattcaaacagcaataacggtaatcagacttcaaacaagacgtatacggttaaatcaggggattctgtctgggcaatttcaaaccgttacggcatctcaatggctgacttggttaaatggaataatatccggaacaactttatctatcctggtcaaaaattagtggttagccaaggtgcaacaactggtaattcaaacaacaataatacaaatagtacaaatccagggcaagcttctgggaagacttatacggttaaggccggcgattctgtctggggaattgctaaccgtaacggtatttcgatggcgcaattaatcaaggctaataatattaagaataactttatctacccaggtcaagtcttaaaattaatggctggcgctacaacgccaacgacgcctaacacgaattctgggaagacttatacggttaaatcaggcgatagtctttggtcaatcgcacaaaaaaataataccagtatcgcacaattaaaatcagcgaacaatttacattctgatttaatcttagtcggccaagtcttgaaattgaagtaagagtttggtatgctaagaacaattatttaacgttgagaaggattagtagttatcgttaagcgtttagagagcgtgtggttagtgtgaacacgtcgtttaacataacgaactcgcctttgagttttctattgaactgatagtagatagaaacgtctgccgcgttaaggccagagagttgtccaatatagattggacagaacttaggtggcatcgcggtcaattcgtcctatggtatttataccataggacttttttattggcgttaagtgaattaaaaaagagtgtgtcaaaagtgtccatgcttttgaaagcacgttaaaaaaaggagtgtttgatatgacttacgatcatcgcgcagttgaacaaaagtggcaagcttactggcaatcacacaaatcgttcaaaacaacagaagataaaaataagaaaaatttctatgcattagatatgttcccatatccgtcaggtcaaggcttacacgttggccatcctgaaggttatacggcaactgatatcttggcccggatgaaacggatgcaaggcttcaacgtgttgcacccaatgggttgggatgcattcggcttacctgctgaacaatatgcgttggatactgggaataatcctgctgatttcacgcaaaccaatattaatacgttcaaacgccaaatcaattcattaggcttctcatacgattgggatcgtgaagtgaatacaacggatcctgatttctacaaatggacccaatggatttttgaaaaaatgtacgaaaagggcttagcttatgaagctgaagtggctgttaactggagccctgatttagggaccgttgtcgcaaacgaagaagtcattgacggcaaaacagaacgcggtggctatcctgtttaccggaaaccaatgcgtcaatggatgttgaagattacggcttatgctgatcgtttaatcgacgacttagacctagttgattggcctgaaagtgtcaaggatatgcaacgcaactggattggccgctcaaaaggcgctgaagtatcatttgctgttgaaaaccacgacgctcagattgatgtcttcaccacgcgtgccgacacaatgtttggtgtcagctatatcgtgatggccccagaacataaattagtggccgatatcacaacgcctgaacaaaaagcagctgttgatgcttatttaaaagaaatcgaacacaagagtgatcttgaacggactgatttggcgaaagataaaacaggggcctttacaggtgcttacgccattaatccagtcaatggcgaacggttaccaatctggatttcagattacgttctagcctcatacgggactggtgctgtgatggctgtccctgcacatgaccctcgtgattgggaatttgcgaagaaatttggtttaccattgaaaccagttgtggctggtggtaatcctgaagaagctgttcacacagaacctggtgtgatgattaattcagatttccttgatggtttagacaaacaagcagcaatcgacaagatgattgattggttagtaacgcataatgctggtcatgaacaagtgagctacaagttgcgtgactggttattctcacgtcaacgctactggggtgaaccgattccaattattcattgggaagatggcacaacatcagtggtgccagaagctcaattaccacttgaattaccattaacaagtgatatcaagccttcagggactggtgaaagtccacttgcgaacttagcggactggttaaacgtaaccgacgaaaatgggcgcaaaggccgtcgtgaaacgaatacaatgccacaatgggctggtagctcatggtattaccttcgttatatcgatcctaagaaccctgataaattggctgactttgataagttgaaagactggttaccagttgatatgtacatcggtggtgcggaacatgctgtgcttcatttattatatgttcgtttctggcacaagttcttgtatgatatcggggtcgtgccaacgaaggaaccattccaacacctatataaccaaggtatgattttaggcgataaccacgaaaaaatgtcgaaatcaaaagggaacgttgttaaccctgatgatgttgtcgatcgctttggcgctgatacattacgtttatacgaaatgttcatgggcccattagatgcttccatttcatggagtgaaaagggcttagccggcgcgcgtaaattcttggaccgggtatggcgtctatacacagaagaagataccgacgaaaacgaccaactttcaagcaagattgtcgctgaaaatgatgaacaattgaagaagagttacaacgaaactgttaagaaagtgacagaagacttcgaaagcatgcactttaacgtggccatttcacaattgatggtcttcatcaatgatgcttataaagttgacacactaccacgtgaatacgctgaaggcttcgtgaagttattagcgccaattgcaccacacatgatggaagaattatgggcaatgcttggccatgatgactcaatcagttacgtggactggccaacatttgacccagcagcattggtcgctaacgaagtagaagtgatcttccaagttaacggtaagttaaaggccaaagtaacagtagctaaagacacaccgaaggaagaattagaagcgatggctaaggcaaatgaaaaagtagctgaattcattgctgacaagacggtgcgcaaagtgattgccattccaaataaattggtcaatatcgtcgccaattagagtgcgtttcaaaaagagtgggttcaagctcggtcaacttttgagcattatcagagggaagcgaataagcgacgtagtcgattgtttgattcactgggataagcgcagaaagttagcttgaaaagcacgtttcagacaagagtgcgtttggttgcggttagcaactgagcattaataaaaaatttcaaataatccaggttttaggattatttgaaattttagattaagcggaagttgttgcaaccaaaaagcatgtttcaaaaaagcagttactgtttctcgcagtaactgctttttcttatttaaaattaatatttaggggcctaattatccttcaattaatataagggttattctaaagcgcttttaagatgataaaaagatgagagcgactattgcttttgggtgttttttattatacgatgataagtaaatttagattctggggttaaccaataatgatgatgctaaaatagaggggtttgaggactatgaaacgaaatttaactgcccgtcagatgcagatgattgcacttggcgggacaattggggttgggctttttatgggggccaacacgacaattaaatggacggggccgtctgtgctgattgcgtatgggattgctggtttattgctgtatctcattatgcgtgcacttggagaaatgctgtatgttgatccagatacggggtcctttgccaagtttgcaacggaatatatgcatccaatttttggttacttaacagcttggagcaatgtcttccaattcgttgtcgtggggatgagtgaaatgattgccatcggcggttacttagaattctggtggccgaacttgccgggctgggtaccgggactggtcgcgattacgttcttatgtgcggccaacttaatttcagtcagcatgtttggtgaattggaattctggtttgcgttgattaaagtcgtcacgattattctgatgatcgtggcaggccttggactcattgtttttgggattggaaaccatatgcatccagtcggcattagtaatttgtggacgcacggcttctttacgggtggctttaaaggcttcatcttcgccttggcaattgtcttggcatcatatcaagggattgaattgattgggattacggctggcgaggctgaaaatccacaatcaacattggttaaagcaattcaatccactgttgcgcggattttgattttctatattggggcgattttcgtaatcttgagcatttatccttggaatgaattgagtcaggtcggttcaccgtttgtgcaaacctttgctaaaattgggattaccgctgcagcatcaatcattaactttgtagtgattacagcagccttatcgggtgctaactcagggatttacagtgccagtcgaatgacgttcacattagccaataatgggcagttaccaaaacgattcttgaaattaaaccgccacggtgtcccattttatgcggtcggggcgatttcattagggattttaatcggggtgattttaaacgccattttaccacttgtttatccaaaagctggcaatgtcttcgtgctcgtttatagttcaagtgtcttaccagggatggtgccatggttcgtcattttgatcagccaaattgcctttagaaaacaacacgctgacaagatggcacaacatccatttaagatgccttggtcaccttattcgaactacattacattggcgatgctagccatcaccttaatcttcatgttcattaatccggaaacgcggatttcaatcattgttggtttaattttcttaatgatcatggtggttatttatttcgtgaaatttggtcggcaaaaataattacaagcaaaaaggcagcctagttggctgtcttttttttattcgattggattgatttgatcgcgatgtaaaacagtgattgattcacccgctgtttggcggcgatcaatgttatcttcgccccataaacagaggagatttaagattttattgagtgactgaccgtattcagagaggctgtattcaacgcgtggcggaatttcttgataaattttacgattgatgatgccatcgttttcgagttcgcgtaattgtgcagtgagcaccttttgggaaatctttgggatgcgttgtaagagctcgcttgatcgccgtggttggttgcgcaaatgacaaagaataacgggtttccatttaccgccgataatttccatcgtagcttcaacgccaattttatatgttttctcattcatttctaattttgattcaccttttcattgtgataagactcaattattacttttcagtaacctactgactaaaaagtgcgtgattgtgaaaatgacgctcctattgaataatatagtacatcagtaaaaaagtctaataggagtgtggcagtatgagtagtaaacaacgggcgaacctcacattactagcattggcaatcagtgcttttgcgattggttcgacagaattcatcagtgtcggcttaatgccattgatgattaaggattttgggattacgatgagtcaagcaggactaaccgtatcgatgtatgctttggaaattacgattggggcaccgattttggcgattttaacaagtcgttggccacggaaaaatttattgttggggattatggttgtctttatcattggtaacttgacggtcgcttttgcgccagtcttcgccgtcgtcttggtgggacggattatttcatcattagcacatgggatttttatgtcaatcgcatccgtggttgccgccgatgttgttgaaccagaacgacgcgctagcgcgattgcggtgatgttcaccggcttgacggtggcgaccgtgactggggtaccactgggaacgttcatcggtcaggtttcaacttggcacatgtcgtttatttttatcgcagcaatcggtgtcttaggccttgttgcgaactggttcttagtgcctaatgatttactattgggacaacccagtcaattcagcgggatcattcgcgtatttaaaaataaagcaattgtggtagccttattaatcacagcgcttggttatggcgggacgtttaaggtttatacctttgtaacgccgattttagaatcaaaaatgggttggtcaccaagggccgttgtgatcatcttaattatttatggtctgatggtggcttttggaaatacgttgggtggcaaatggtcaaatcaccaaccgttgatggcgctattgaaaatgtttgttggcttgttagtaaccttgttgctattcatgttaacgttaaatggccattggttcggtttaattaacgttttattgatgggctttttcgccttcatgaacgttccagggctccaattatacattgtgcagttggctgaaaaaatcacgccaaatgatattccattggcttcggctttgaatatctcagcctttaatatcgggattacgataggctcattagttggcgggcaagcatcggcagcttggggcttagacagtacaccaatctttggcggtatcatggtttttgtcagcattctgttgacgtggtatttgattcaacaaagtaaacaagctaaataatgagatggcagagggctccgcgaaggcggggatcttttttgaaacgtgctattggcgctagatttctgcgcctaactacaaaacgggaatcatggccgagtacgccataattcccgtttttaggttagtgctcaaaatctgggcaagcgctaatagcactcttattgaaacgtgcttctgatgacaacaacttccgcttaatctaaaattcccaataatcttaaaacctggattattgggaattttgtattaatgctcagttgctaaccgtcatcagaagcactctttttcataaagttttgttaaaggaattgcaaggcttggggcaatcctctaaaatggtaggaagatgctttttgacgtttaataagggagttatgggaaatgaccaattcacctgaaacaaaggcgacggatagatcttcacaaagtaagatgttacggggctccgcttggatgaccgctgggagtattttctcgcgaattctgggcgccgtctatgtaattccgtggccaatctggtttggcgcgaatttcttacaagccaacacattatttgcaaaaggataccaaatttatagtgtctttttagtgatctcgacggctgggattccaggggcgctatcgaaacaaattgcacgctataacgaaatgaatgagtatggcattggtcagcgtcttttcagaaagtcgctgattttaatgttggcaatgggtgttttatcagcgctcgcactctttgcgttagcgcccgttctagcagcgggtgatccgcggatggtaccggtcttccggtcattaagctggccgctattgattattccattgctcagtattatgcggggctttttccaaggctatgccgaaatggcgccgtctgcgatttcgcaatttattgaacaagcagcccgcgtgctgtacatgaccgtgaccgcttttatgattatgcaagtgtttaaaggcagctacgtggatgctgtgacgcaggcgacatttgccgcattcattggggctgctgccggcttgttattactgattttctattatttgaaacaacgcggtcgcatttcagagttagtggccaatagtaacaacgaattagaagtgtcaacgactgacttgttaaaagggattgtgcgccaatcaattccattcatcgtaatcgacgcaagtgtcaacttggtctatatcatcgaccaatacacgtttaatccgatgatgcatgatttcgtggttgccagtgatcatcagttgtataacttgtatgctttatttgcagctaatgcgaataaactgatttcaatcaccgtttcactcgctgctgccatggcggtcacggcgattccattgatgtcagctgcgcatgtgcggggcaatcaaaaagaattgcaacatcaaatcggcagtactttgcaattattcaacttagtgatgattccagcggcatttgggatggcggcggttgccggtccgctttacacgttattctacgcgcatgatatgcttgggattagtgtcttacaattttcatcttacatttctattatgctcggcctctttacggttttaggcgctgtcttacaaggcctctatcagaaccgcttggcattgttttacttattcatcggattcatcgtcaaaattgtggcgcagtacccagcgatttattttttccgtgtctatggcccgctagtatcgaccggcttagcctttgcgacaagttcggttttaatgattgcagcactgcatcgctattatcactttgcattacgcaaaaccattcggcgcttaatcggcgttttaggcttctcattggtgatgtatttggtaacggcgggggcagtcaaggggttataccttgtctttaacccgtacagccgtcttcagagcgttctagtcttaatgattagcgttggcctaggtgtggctgtttacgccgcattggtgcttaaatcgcgcttagcggactatgtcattgggagtaacttggatcggtttagaagaaagttgagaatcaaatgagaattgatcgctttttaagtcatatgaatgtggcttcacgcaaagaattaaaggtactttttaaagcgggacgcgtgcgcgttgatgggactgtggtcaaagatgcgaagttcaaagtgaacgaggcgaccgttgtctatgttgacgacgaacccgtgcgttatcaaacctatttttattggctgatgaacaaaccggcgggtgtgatttcggcgacgactgatccccagaaaacagtgcttgatttattggcaccagcggacttgcgggatgatctgtttccagtggggcgattggataaagatacaaccggcttattattgttgacgaatgacggcgatttaagccatgccttgttgagtcctaaaaaacacgtcagcaaggtttatcgcgccacgattgccgggattgtcacggcagaggatcaagcgcggtttgaagcggggctcgtgttgagtgattttactgcacaaccagcacagcttgaaattctgagtgttgatgaggcgcaacaagaaagtcagattaccgttgagattcatgaaggtaaattccatcaagtgaagcggatgtttcatgcggtcggcaaggaagtcttgacgctagaacggcttaagatgggaccactggcattgccagatgatttagaccgtggccaataccgtgcgttgacagatgcagaacttgcattacttaaagcgaattaataaacagcagccctttcaaaaggactgctgtttttttaagattgatgaatcattttagccatatagtgtggtaaggtctgaatcacttggctaggaagtgtgacgtattgggttttggcgagttcatcagcaatcgcactgtgggtataaacagcggcacaaatcgtctgatagtgggtgccaaattgaccacagaatgcggcaataataccagtcagtgtatcgccgctaccgccagttgccatggaaggcccaccgatggttagttgctgaacctgttgctgatgatagacctcagtgtgatgttttttaagcactaaagtcgcgtttggataagcagcgagtgcggcttgattagtagcaaccgtttgctgctcgattgcaatgccgctgaggcgcgcccattccatttgatgcggggttaaaatgagttgcgtattcgggatcgtcagtttttcatgtgcgatgattgatagtgctgaaccatcgataatcagtgtttgtgttggttggatggtttgtaagatttttctcagcagttcaacggcaaacgaagtaatgccaagaccaggtccgacaacaacgacatcagcagcctggactgcagacgaccactgcacgaagggttgttgataatcaatgaacatggcttctggtaagcgcgcgtgcagtccgctgagaacacttaagtcactagcaacggaaactaatccagcaccagcataaacagccgcagaggcactcataatcgcagcaccgccgtattgctgactaccaccaatgattaagacgcggccaaaatcgcctttatgactgatggcaggccgtgcctgcaggaccgcacgaacggttgaatttgtgatgacttgcatctgaatccctcccttatcaactattattataagcgaaatattaataaatgggtattggcagggctctgtaacactggtacaatagtcttgtagcacaatcgcccgtgtggcggaactggcagacgcgcagcgttcaggtcgctgtttgggtaaccaagtacaggttcgaatcctgccacgggcattatggattaaaaaaggatcgctatcactttagatagcggtctttttttgttcaaaaagtacatcgattattgattatttacctcattatgactggtttagccaatggattagcgacaattattagcactattcaaaaaagttgcatcaattttaaggaattaaaccattagtagaaaacgatagctttaaataaatattttcttatcaatataattattatttgaactataaaaacggctgaaagctacaagctgtaaactgcatcgcgattaaaaggtcatttaataaataaaaacatcacaaacttggcgaatttcaataaaaaaatattaatagggttaaaacttattaaaaatatttttttgtcaataccgttaatttcagctatttacatttaattaatttatataatataatgcctgtggagcagagcaggattactagttcgcatattgtaggtcctcaaaatagatagaaggagtaatgcttattatgaataatcaattattaatgctcattaaatatcgtaatattttggatcaattatttgtcacagttttgcaaaatgttgacttatcactcgaacaatatttgttgatggaaaaaatggatcgtgaaaaagaagaaacgcccggcaaccttgctgcttgtatgggcgtttctcgaccagctatttcccgccaatgccaatcgttgggtgaaaaaggattaattgaacgggctaatgtggggagttttattggtgatagtcgtaaagtatactatcgacttacaaccaaggggaaacagttattattaaagattagactaaacagtaatgacatgattgatagtttggattctggatttgttactaccaattgggatgaaattgataaccaaattgcgctaatgtccgacgcggttaaaagaacattcaatatcaatgagattcaaatcttttagagagactatcggaatctgaacgggggagttatttagtttagcgcgtgttaatgggcaggatcgaagcgatggatgtcgagtatgattatttttgaatgtaaccggttgcgatgaattggcataaacggtatattattaaggtatctaagggataggagagaactaagcatgacaattaaattaatcgcatccgatatggatcataccttattaactgagagtggccagttgccaccaaactttataccaaccattcagcaattacatgctaaaggggttcaattcgcagctgccagcggtcgaccaatgtacacgttaaagcaaatgtttcccgaacttgctgacacaatggtttacgtcagcgataacgggggtgcaattggttatcaaggtgaaactttattcaaaagtttattgccgttagctgattaccaacggatggtccaattcgttaatcaaacgccagatgggattggcgtgatttgtgggatggacgcggcgtacgttgaaacacaatatcgagattatgacgcgactttgcggcaattctatgccaacattgaatatgtacctgatttaacgcaggttagtgttgaagccaacaagtttacgatttatttcccgggaaaagatagtcaagcacagtatgaagctgttttcgcacccgaatttgaaccggcttattcagtaacggttgctggtgttgaatggatcgatattatgaatcaaggcatcgacaaaggccatgcaatgcgctttttggcggattatttcaacatcacgccggcgcaaatgatggccttcggggatacttataatgataaagaaatgctgcaaaccgttgaacatagttatttgatggggaatgctgccgacgatatgatccaatatgcgacttatcgtgccgacactaatgagaactatggtgtgttaaaggagattcagaaattactttagtcaaccaatcgtagatgaattggtaatgctgggtagcatctgtttctaataaaatttcatgcgctgtatgaggtagaatgcgcaccgttgcgttgttaacggtgcgctttttgaattggttcgttaaatgccgcgcgcggcgaccataaccgccagctggatcgtcggcgccactcattacgagaactgggcgggattgtaaggcaagttgccaatcagcatgccgagttaactcagtgagggtgaagagcattgcaaaaccgctatttgaaaagacgtagccacacaatggatgctgttcgtaggccgccacgtttgcttgattgtaacttaaccatgaaaaaggtcggtgagcatcaaatcgtttaggatagaccccaaacgccaagttattccagacagtaccggggcgcttagctgcaatggcgccgattaatttaacgattggtaaggcgggtttaagaatgaagggtacatcgataacgcccatgaagatggctccagtaatcggcacttcagtttgcttaacatattgtgtcgctagcattgagcccattgagtgtccgagcacaaataatggtagctctgggtattcctcgtggacaatgcgaccgattaaggtacaatcgttgactagcgtctggagcccgtttggcccgaaataaccgagctcatcgttggactgaacggagtggccttgcccaatatgatcgtgtccgatgacgataatcccacgatctgctaagaattgagcgaaagcatcataacgttcgatatattcggccatcccagttagaatttggacaactgcgaccggtttttggattggaaaccaagtcacgacatttaaagtatggattcgatcagtagattgaacggtcaatttttgcattggttagcgcctcccgaaaaagataacgtactttacgattcattttagcagaaacaatctagagataccaaaaggacgccaaacaactttaaccgttgtttggcgtcctttttagtcatgcttaaagttgcacatcatcgttaattcgtgttgcgcgtgagaagtatttcgaatagaagcgactgataattccccaatagtaaaagatgagggctaatgcgctaattaagacgaaatcgagtgggtaaggaatcaggttaattccgttgaattcccgactgcccaagaatgaaatcagcgaaagcaatgcgagatagataattaaccataagcttcctttgaattgggcccaagtattttcccagtgaatccgatactcatagtagaaataaaatggtaagccaagcataatgacgccaatcaccttaatggttgttggccacattgcccagtaagttgccaaactggcaaggacaaaggataatggcgacatgattttcatccaaggtgaatgaacagggcggttcatatcaggggccattttacgtaatgacatgacggtgaccgggccggttaaataggcaatcaacgttgcggttgaaatcacgctggctaacgttccccaacttctaaaaattgaaacgagtagcatgctgacgatggcgttaatggccatcgcaatgcgaggaatattatattgttcgttcatgcggccgacaatcggtggcatgtgtttgttctgctttaatgctgctaatgtccgtgcacatgaagcgacaaaggaaacgccggtcccaaagggtgaaacaaacgcatctaagtaaagtaagacggctaaccaatggattccaagtaaaatggctaagtcggcaaagggtgattggaagtttaaaccgtgccaaccgactttggcgagcaaggcgggtgaaacagaaccgataaaggtaatttgcaagagtagataaatcacaatactgatcccaagtgaaattgcaattccacgtccaatattccgtttagaatcacggatttcactgccgacattgattactgtttgaaaggcattgtatgaaaagataatcccagaaatcgaagtggctgcaaaaattttggcggaaccatagggcataaacgtcgccattgaatgcccgaagttgccagtatggaaaccagttgagactaacataataatggttaataatggcacacctaatttaaagattgcaatgaagctggtaaaacgggtcaagaatttaacggaccagaaatttaaaagggtgaagacgatgataaaggcaaagacgacgagcaagccacgattcgaaatttcagcgtggtgcataaagtgattcgtccagttagcccacgcccatggccaagaactcatatactggacagcagcgacggcttcgattgggataatcgtgactaatgatacccaattggcccacgctgcgatgaagccgagtaatgaaccgtgactatattgggcatagtgactcatcccgccactttcaggaaacatcgtcccgagttcaacgtaattaaaggcaattgcaccaatcacaattgcgccaacaatccaagagatgatggctgctgggcctgccacggtcgttgcctcccatgcaccaaacagccaaccggaaccgatgatggaacttaaacctagcatcactaggctaaataaactcattttgttcttctctatcataaagacctcctgtgtatggtgtgccattatagcaaccatcaccgttggtttcaaattaaaaatgcggctaaaatgagtcgtgaagtctatcaaattaacaatggtaacgccttctgaattaattattaacaattaaaaaaaccgtcacaaaaagtgacggttgaatagttaatttaagtcaattgccccgttgaatggcatccgtttgtttaaaaagatttaatttacgatcgttccagaatgtttcagacatatcgcgatagaagatcgcagtctgacagcctgggcaacgtttgataccatattcaattggcgcctgacatgcagggcaatgaaatgcggttgattcaggaattgtattttgcgaatcggccattaaaaggactccaatcaagttgttatcaatagtataccgcatacatacgctatttgttaagcgtttaaacctttttttttcaaaaaatatgcacaaatcggaaataatatgctatactatatcaagtaatgcgagtgtagtttagtggtaaaactcaagcttcccaagcttgcgtcgcgggtccgattcccgtcactcgcttaaagattcatgcaaaagaggttgcaacagaagaaattttgttgcaacctctttttttattctctgaaatttaatcctcggcggatacccgacttacatcacactcttttcgttatcagacctaaggccgattgtttgtttaaaggcgctctgataaagtatatttattatctatcgactaaaaaatcgtgacacttacgagcaatctaagtagtgggagcgtacgacattgacattattagagattaaagatattcacaagtcctattatatgaacaaggctgaatttaaagtcttaaaaggcatcaatttaagctttgaccgtggcgaatttgtttcaatcctcggggaatcaggcggcggtaaatcgacgttgctgaacatcatcggtgggttagatcaccactacgatggggagctcatcgttgatgggacatctttaaagaatgcatccgaaaagaaatttgatgcttatcggagtcaaacgattggctttattttccagagctttaatttaattagtcatttgactaacttggaaaatgtgatggtgtcacttgaaatgactgatctatcacataaggaacgggttgccaaagcgaccgccttattggaacaagttggcttgaaggaacatatccataaacatcccaaccaattgtcaggtggacaaaagcaacgggttgctattgccagagccttggctgctgatccagatgtcatcattgccgatgaaccaacgggtgcgttagatagccagaatacggccgagattctcgaaatcttacaaaagattgccgaagatggcaaactcgtcatcgccgtaacccattcacaagccgttgctgaccacggaacacgggttgtccacatggttgatgggcagattgattatgacaagcaattaaaaccagcttacccagctccaactggtccggtaattaagaagagtagtccattaagttttatgtctgctttcaaaatggcaatgcaacacatgcgctacgatattaaacggaatttgctcattatttttggcgcgtccattgggattttctccgtcattttaatgctaggcttgggtcaaggggtgactggctatattaatgatcagatttcatcgcaagttaatccaaatacgattcagattgcaagaaacctcacgcgcaaacagattgaagccggtgaacaaggtaacttagctgataaggatatcaaccgccttaataaggtcaaaaacgtgacgaaggttgaaaagggctactatatgaatggtgtccaagtgcactatcaaaagaagagtgaaacagtccaaatgttccaaacgtttaataaaaccgaacgtgtccaagatattaagaccgggactaaacctggggccaacgaaattattttaacgaaggcaatggctaagaagttagataaaaattacaagaagatggttggtcggacagtaaccatttacgtcaatgccattagtaaggatcaacgtccagttcaaatgcgccaagatgtgaaagtttcagggatcatcaattctgggactgaagccgtcacatatggcacattagccaagatgtaccaagcgcaaggattagagtttgcacccaactttgcagcagtcacggttaataagacccaaaatgttaaagccgttcaaaataaaatcaaaacctacactagcaaagtcaacggtaagacacaaaaggattaccaaatcacaggggttggtgcgatcctcgattcaattaacacttacttgatgttagccttctacgtcttagctgggattgccgggatttcattattggtttcagcaatcatgatcatcgtggtgctctacatcagtgtgtcagaacggacgaaggaaatcgggattctacgcgcaatcggcgcccgaaagaaagatattcggcacttattcgtctcagaagccttcttgattgggttattatcaagtgttcttggtgccggcattgctggccttggacaattgcttgtcaatacgttggcccaaccattaacgcatatgccaattgtggcaattaccagtggctacgtcctattcgggataatcatcagcattatcatcagtctcttagcggcactagcaccttctcgtaaggcagctaagttagatccaattgaagccctcgcggcagaataattgcgcttgaaaagtgcagctaagttctatatactaattatcaagttcgaacagtcaaaagaatagcatcaacagcgatttatagcgagctcacagacggtgtaaggtgggtaatcaagttgacgcggcgcgcttttggttgaacaattgcatactattgagtggatcgattgatcaatcagagtggtaccgcgggaattctcgtctctttcatttatttggaagggactttttttgttcacaaatattaggaggctatcaacatggattttaaacaacaagtcaccactgccttaatgggcgttttaggggacagtttaccagcagataaagtagcacaactcattgaaacaccaaaaacatcagacttaggggactatgcttttccaacgtttatcttagcgaaaacattacggaaagcaccccaacaaatcgcccaagacttagtcgcagaaatggatcaagccggctttgaaaaagtgattgccaacgggccatacatcaacttcttcttggataaggctacgtttagcgaccaaatcctcaaaaccgtcttaacgcaagccgctaattacggccaaagtgacctcggtaaagggggcaacgtgccaatcgacatgtcatcacccaacatcgctaaacccatctcaatgggccatttacggtcaacagtgattgggaactcaatcgccaaaattttgacaaaagtgggcttcaacccaattaaaatcaatcacttgggtgactggggtactcaattcggtaaattaatcgtagcttataaaaaatgggggagtgaagaagaagttaaagaagacccaatcacgaaccttttgaaatattacgttaagttccatcaagaagacgttgaacatccagaattagacgatgaagcacgggcatggttccgtaagcttgaagccggggatgaagaagcaacgaagttatggtcatggtttagaactgaatcattaaaggaattccaaaagatctatacgatgttaggggtcgaattcgactcatttaatggtgaagccttctataacgacaagatggacggtgtggtcaacgcacttgaagcaaaagggctcttacaagaaagtcgcggtgctgaaatcgtcgacttaacagcttacaacttgaacccagccttgattaaaaaatcagacggcgcaacactctacatgacacgtgatttagccgctgcgatgtatcggcatgacacatacgacttcgtgcaatcattgtacgttgttggtggcgaacaacgggaacatttcaaccaaatgaaggccgttttaaaagaaatgggcaacgattggtcggacgaaattcaccatattccattcggcttaattactcaaggtggtaagaaattatcaacgcgtagcggtcgtgtgatcttattggaagaagttttaaatgacgccgttaacctagcacaacaacaaattgaagccaaaaaccctgatttaccaaacaaagaagaagttgcaaaacaagtcggcatcggtgcggttattttccatgatttgaagaatgatcgtttagataattttgactttgacttagaagaagttgtgcgtttcgaaggtgagacaggtccatacgtgcaatacacaaatgcccgtgcccaaagtatcttgcgcaaggccaaccaagaagtcgcaatggacgctgacttagtcgtttcagatgccaacgcttgggatgtcttgaagatgctcggcaacttcccagatgtgattgtcaaagccagccaagaatacgaaccatcagtgattgccaaatacgcattacgcttggcaaaagccttcaacaagtattacgcaaactcaaaaattttggcagacgacgatcaaaaaaatgcgcgtctttcattagtgaagagtgtcagcacagtcctagaagcctcactagacttattaggcgtacaagcaccaaaagcaatgtagagtgcgtttaaagcggtttgactctgagcatttgcctaatatcgtgaataagcgacgcagtcgattgtttgcgatatgtagcaaagcacaagagtcagctttaaaaagcatgtttaaaaacagagtgcctttgaaacggtttgaccttgaggattaacaaaaaaatagcgattatggcgggttttagccataaccgctatttttaggttaaccggaaaggtcagtttcaaaaagcacatttaagccacccgattaaatcaatctggtggcttttttatttttcgaaaaattctaattcgatgacaaccccgccaacttccgttatagtaatcttgaaatagtgggggagggttcactaatggtattagtcttaaaacgccagattaaagggattccggttttggaagtggtcgctgacgaacaacgtcatcagccattaccactcgtgatttactatcatggctggcggtcagcaaaagaattggttttaacgcaagcgcgtaaactggctgaagctgggatgcgcgtggtattaccggatgcactgaatcatggtgaacggctgcaacctgtttcagagattccgtcatggactttttggcaaagtattcaaaccaaccttgccgaattcagtttgattgttgattactggcaccaacttaatttaattcaagctgaccgcatcggcgtcgggggtgtttccatgggtgggatgacaacggcggcactcttaaccaagcatccagaaattaaagtggcggcttgtatcatgggctcgccggcaccgctagcctatgcgcgcttagttcgtgaaaatatccgtgcgcatcagttagcacaacctgacgatctagggttattgacaagttggttaacggcctacgatttaactgaacagccgcaggcaattgctcaacggcctgttttattctggcatgggacagcagatgaacgaattccctatgaacaagtagcagcttttgaacagcagattaaaggtcaaacttatgccaaaaacgtgacatttttaacagcaaatggtgaacgccatctggtgaagccagcgctgatgaacataattacagatttttttagtacgcaactataaaataaatcatttttaaaaagccaacgttaaattcttagcgttggcctttttgacgtgttttatttcttggaatattaaaaaaataatgatttataatggggattaaaatacgaatttagacgactttttcattggtttggtatagcgggaagaatgctttttattatttgtataatacgtgttgtatgcttatcggtctaattgtttatcgcagtaatatggattttatgtgtcgataatatttatggaaacaattatctgtttattatagacggagttgatgaagcgtgttaagttaaatgtgttccaaaaataattttttaggagatgagactatcaaaaaagtagtaggtattttagcgttcggcattttaacgaccagttgcatgagtattttacaagaagcaagggctacgaccagttctaattaccaaagtaagcaaagtgaggtgcttgatgatagcctccaacctaaggtgaggcaccagaagggtgtaacacgttcagaaaaggcgccatattcaaaactgtatattggccgcggtgatgttaataaagaattggctcggcaacaaagggccttgagttattcaagcttagagccttccggattatacgccaaaaaaggggacgtgctgacggtgagcaaaacgggtcaagacttgatgtctctgacgattggctcgcctgagcgagatgttcagaaacgatatccgctcgtaaatggggtgacgactattacagttgaaaatgatggccctatttatgtgacgaatccaaatgattcaggcggtactagggtgtcaatctttgatgccactggtgaaatgccgttctttgatgcaaacaagacgagtgtcgaagattttaagaaacaaatgactgaaatgacagacgcaaaagatgttcaacttgttagtgatcgtgctttaattactgtgagttatgagatggcaaagaaatatttgggggatcccaaagcgttaatggctaattatgaccgattcctggtcgctcaagatcgagtttcagggatcagtaatgaaggtcggccggttaacttttcagatcgccatttacaacatttcttagaatcgccatcgtattatatgtatgcgacaaacgaatacatgggttttaaagacgatgcagctatgaaaagtttattagaacttcaggatccttgggaaatctggcatgaaagtggtcatcagagacaacaaaaaccatggacatggagagaagttgtcgaatcgagtgttaatatttattcgttagcagcgcaaaaagaaatgacgggtgcgatgcctgatttagataagtattatccagaaatgtacgcctatctaaattctgatcataaaaacttcaatcaacaaggggactttgtcaaaatgacaatgtttgcccaactagcaaacacctttggcgatgatttctacccgatcttacatcagtattatcgcgaaaatcagttagcctatgattcaaatgaagatcgaatgcagcattttttgttacatgtctctgaagtaacgggctataatatgctcccttattatgaacaatggggatttaaagtttctgaagaagtacagaagaaaatcagcaactacacaacgttggctgacccaatttggttaaatgacaatcaaactaaaaaacaattgccaatgagcttaatgaaggctgtgtcgctcagtaaacaagggattaaagttgacttaacaaactatcaaattaatatctttaaggatcagaaattaattgttaagaaaaatggcaaggtgatcgcggagttggctgataagaaaccagctaatgggatagttattaatgatatttggcagattgatgaaccacttgatgtaaccgatatgattatcattgaacaacaaaatgccaatgggacttataatcggtttaatcaatcgatcagtgggacttcgcttagggaacaattggaaaactatttaaacacaacaaaaccaatcgagacgattctaacgcaagataaattaaacaatctacgccgacaggttgatgcactacaacctaatactgataaagaagaattaatggagatggttaaaaagctccaacaaagatatttagacgtattagttggtgaaattgaactgaattcagaatcagaacttgtggtgacatttgctgatggaaaacttaaggaatatgacgatttaaaagttcaagcagatacacatacgattgctcaagtaacgaatggtaagccgaatgttggtcgtgttgaaggaaatcaattgattattccaaaccaaaaagatgccactgcgatctcgatagcggtgactttaccgcatggcacttatctagtgaaagtgattagccaatcggtgcttgttgctagaaagttagtatcggatttatttgaacaggacggtaagttgaaaccaaatgtgacgcaagaagtgttagatcgagcatggcagcaagtaaatcagttaccacaagacagcaaagaagcgctagcgaaaaaaatgaaggaggcacaacagttattcttgaatgcgcttattgcggatgtaacgcttaaagatgccaaaatgatggtgacttttgcaaatgacctatttaaaaaatatacgattcttgtcatggaagaagaccacagcatagggacaatagtgtttggccaggcctttgagggagaattaagcggcaatgtctttacaccaatgcgtttaacagtttcgggtaaaacgtatcgggtaaacgttatgcacaatagcggtacctatcaagttaaaacgttggtagctgattgatgggttatagcgaaaccagataaactaatctaaaggcttttttatgaaattaaattgaaatacaaaattgatatctatcaatgaaaggctgagcaatagtgctcgcctttttatttggtttcaacatttgataatccccatttccgtggtagtctgtatataaagcattatcagatggaggttaggcaaacgtggaaaatggacgacttagacgtgctagtcagtttaataagacacggtttcgctttgtgggcaaagggttattagttggggcgttcactggattggtggtcagtttatttcgcttagcgattgaaaaaggactggcctttgttatcactatctatcaagggttaaatgcacacccgtggtattgggtgccattggttggtgccaatttattgatcggcctgcttgtggcacaattattaaaaaaggaaccgaatataagtggttcggggattccacaagttgaaggacaattggaaggtgagtttgatttcaattggtggtcaatcctgtggcgtaaatttgttgggggcattttaagtattgcacctggcttattcttgggacgagaaggcccatcgattcagctgggggctgccgttggacagggggtcgccgctaagttggtaaatcgcggtgctgatcgtcggattttaatcgctagtggggctgccgcgggcttatcggctgcgtttaatgcaccaattgccgggacctttttcgtactagaagaaatctaccataacttttcaccgttagtttgggtgacgtcgcttgctagcgcaattgcagcgaacttcatttcattaaatttttttggtttgacaccgacattacatattacgtactcccaaagtttgccaattaatcagtattggcatttgttgatacttggtgtcgtattaggactgttgggatacgtttatcagaaggtattattgtagttaccacaactttatgcgaagctcccgctgccaaaagcgtataccggattagtgccattattatgtgttttgccgattggttatttctggcccgaaattttgggtggtggcaatggattgattgcacaccttggacaaaatttaccgacaatcagtgtggtggccggtctattcctattacggtttgttttttcaatgatttcatacggttcaggattacctggtgggatttttctaccgattttatcacaaggagctttaatcggtgccctttatggactcataatggttcaacttggttggttagcaccagtttatgttcccaacttaattatttttgcgatgggtggttactttgccggaatcgggaaggcgccatttacggccattctactagtgaccgagatggtaggttcgctcgtgcacttgatgccattagcaattttatcgttggtggcctacatcgtcgttgacttaatggggggcgcgccaatttacgcatcattattgcaacgcgcacttggcaaaccacatcgtaagttagcaacattctctgatcgcttggaggtaccagtgtttgcgggcgcaccgttagaggatcgccaagtccgtgaagtggactggccaaagacatgtttgttaatcgcgattgttcgtggcgaatccgaactgattccgcatggtgatacgttgatccgtgctggtgacacgttgattgtgttaacggatcatcagctacgggcgacggtgcggcggcaaattgaagacgctgcccaagccttgcgaaatacggatgagaatctcgtgaaataatcgataaaaaagtggtgattaactactttttatgctaaagtattaaaagacagtgtagatagaaaggtagggaattaggttggaaaatcttatcctgaacttattattaatcgattcaatcttgattgtgatcgcagtcatgatgcaaccaagtaaacaacaggatgctttgagtgcgttatcaggtggttctggtgatttatttggcaagcaaaaggcccgtggtttcgaagctttcatgcagaaagtaaccgttgttttaggggctttattcttcgtctttgcattagctttagtgtacttatcatcacactaatacatgtgagacgggtcgaattctaataagaacgttgatgcggtctcctgttgaatggcaggagacctttttaaatgaattcaagcagtaaggactttgggggtgagcgcgtgtcttatcggttgccgcaaccgttttattttgacggtggttcagtcggggttgtgttgttacatgcttatacaggtagtgctaatgatgtccgtatgatgggccgctttttggagaaaaatcagctggcggttagtgcaccacagtttgcagggcatgcaacggctgatccaaccgagattttaacgcgcggttctgtcgatgcatggtgggccgatacggtggctgcgattgagcagttatccgcggctaacaaacaaccgttatttgttttcggattgtcattaggcgggttgtttgccatgcgggcattagaagaactaccacaagtttgtggtggtgggatttttagtgcgccagtactcgaaggaccgactgctaaattgacgccgctctttggccaatatgctaatcgaatcatgcagttaatgggcgtcccagctgcgcaacagacagcacgtttggcgactattaatcagcaattaccacaacaacttgcatcaattgatattttcagtcgacaagttgtggctgacttgaagcaaatcggagataaaccggtcttcatcggccaaggcggacaagatcaagttattgatccaacgcaagcccaagtcttacaccagcaattaacgcaacaaaacataacagttgattatcattggtatccacaagccggccacgtcattacggtcgatagtgcgcatcaccaattagaaacagatgtcctagaatttataaaccgttttaagaaatgagaaagaggtgttgatgtgacacaagttgaacagatgaaagcagcgattcttgcaatttttgaagcagatgcaacgcaacaattaaacgtatccgaaattagtgaacgaatcggcgttgccggttcacaagggttcaaagacctagtgaaagtattagcagaattagaaggggataagacattgaatatggacgatgccggtaagttcagattaccagccagcaaccgccttgttgaaggggtcttccatgctaacgatcgtggctttggcttcgtttcaatcgttgataaggaacctaatgatccagatatctttatcgccccacccaatacgaattttgcgatgaatggtgacacggttgaagtggccatcattaaagaagccgaagaaaacagccgtcgcggtcctgaaggaaaagtggcgaaagtgattacgcgggggattgaagaaatcgtcggcgaattcatgccttattcagatatccaaaaagaaaaaacaggctggattggatacatccaaagtcatgccaaaaaattaagtaattaccgaatttatttaacggataatgggttacatccacaaaagggtgacatggtccaagttgacgttaccggttacccaagtgttgaggcgccaggtcaaatgctggggattgccaaacaagtacttggtaacaagaatgatcccggcgttgacgttttatcaatcgtgtatcaacatgatattaagacggacttcccagaagaagttcggcttcaatcagaagcgattccagatacggttttagaatctgataaactaggtcgtaaagatttaacggatcaagacgttgtgacaattgacggcgacgattctaaagattttgatgatgcagttaacgttaaaaagttggcaaacggcaactactacttaggggtccacattgctgacgtgagttactacgtcactgaaggttcaccattagacgttgaagccttagaacgtgggactagtacttatttaactgatcgcgtgattccaatgttgccattccgcttatcaaacgggatttgctcattaaatccagacgttgaacgccttgctttaacgtgtgaaatggaaatcaatgaacacggcgtggtagtggatcacaagattttcccaagtgtgattaagtcaacagcgcggatgacatacaaaaacgtcaataagatcttaacagatcaagatgctgacttacgggcgcaatacgaacggctcgtgccaatgtttgaaacgatgtcagaattacatgaaattctcttgaagaagcgtcataaccgtggtgcaattgatttcgaagaagacgaagctaagattatcgttgatgaaaatggcaaggccatcgacatcgaattacgccaacgcggtctttcagaacgcatgattgaatcatttatgttggctgctaatgaaacggttgcagaacattacagtactgctaatgcacctttcttataccggattcatgaaacaccagatgctgataagatgaagaatttctttgaatttatcacggcttatgggattcaagcacacggttcaagtaagaaagtgacgccaatgatgctccaagaagtcttgacgcaaattgaaggtcaacctgaacaaccgattattacaacgatgttattaagaagtatgcaacaagcacattattctgatgaatcccttggtcactttggtttgggtgcggaattctacacgcatttcacgtctccaatccgtcgttaccctgatttgatggttcatcgtttgattcatagttatgccacaaatgggatgacgattgaagaaaaagaaaaatgggcacctaagttacaaccaatcgcagaacaaacatcccttgaagaacgtcgctcaatcgatactgaacgggaagtcgttgatcttaagaaggctgaatacatgcttgataaggtcggtaatgaatacgacgctgtgattagttctgttaccagctttgggatgtttatcgcattaccaagcacggttgaaggcctcgtccacatctcacagatgaaagatgactactatagctttgttgaaagccaattagcccttgtcggtgaaagaacgcataagatgttccgcattggccaaccagtacgggtcaaggtcgcgaatgttgatttagatgcccactcagtggactttgaattattagccggtgaagaagtgccattggcttcggctgaaatcttaagcaagattgaagcacgaccaaaacgtccagcacgcccacgtgatcatgaaaaaggcggtcaacgtcgtggtgatcaaaagaaaaacaatcatccaagacgcccagctgcgaacaaggactcacaaaaacgtacttttaaaaagtaggtgattgaatggcaaagaaacatcctcaaaaaccagcaaatttaattgcacagaataaaaaagctggtcacgattataatattttggaaacattcgaagcaggcttagtgctcactggtaccgagattaaatcggtccgtaagggcaaaatcaacttacgtgatgggttcgcccgcgtccgtaaaggagaagcctatctcgaaaatgtccatatcagcccttatgaacaaggcaatcagtttaatcatgacccattgcgcaaccggaagctattgttgcacaagaaggaaattaccaagattggtgctttaacgaagaataaggggattacgattgtgccgttacgggtttatttgaaacacggctttgccaaagttttaatcggcgttggtgaagggaaacgggaatacgataagcgcgaaacactgaaacgaaaagaacaagatcgtgaaatggcccgcgcagttcggattaaaggttagtcctttaattaaaatctaagtataaagtcaaaaagctatcacaaaatttacttttgtggtagctttttctattggaagtatttggtttgtcggcggttacaagtgggtttttattacacaaaaattataaatgtcttcaaactgtaatataacgtcattaatctgcaatcttcttgcggggattgttgcgtataatcaagtctgagttatgaatggaggagtttaacaagatgcgatttagaaaactagcgttagctgttgttacctgtttagttgcaatggttacgatgggcacatctgttagtgctgccagtttgagcgaattacaagcccaagaaagcagtacccaaaaaagtattgatgatacaaattcgaagattcaagccactttaacgagcgtgaatgcgaagtatcaagaaattaatgccttaaaggaaaagattaaggataacgaaaaaaatatcgaacaagcacaaacgcttttgaaaaagcaacaagccactttagcaaaacgtaaaagctatgctaaggaacgcttgcaatcacttcaacgaacagccgatgaccgcaacgttgtcaacgcactattgtcagctgattctttgagtgatttcttcaaccgggcttacacattgacggttcttcaaagtgctgacaaccataatatggatgaattagcacagagttaccgtgatacacaagccattcaagataagttacaagctagcaagacagaacttgatgaacaacgaagcagtttggatcaacaatctgtcgaactggaacaacaagtggctggcttaaagaataatttaagtcaaagccaagcggatcttgcaaaaattgctaaagaaaaagcagaagaacaagcacgtgaagaagctgaagccaaagcggctgaagcagctaaaaaagcggccgacgaagcaacacaagcgccaattgcaccagttgtggacacaaatgcccagcaagccgatttagcaagcgctgctgatggcaaggccggacaagcgattcaagtgcaagcaacggcttattcaactgccgaacctggtttgagccattttggtgcaactggaattgatttaactaaaaacccaaattgtatcgccgttgatcctagtgtcattccattaggctcacttgttttggtacctggttacgggtatgcaattgctggtgacatgggtagcgcgattaaaggtcacattattgatgttcattttccaactgttgcggcatgtaagagttggggtcgtcgtcatattacaatcacaattattaagtaattttaaatacagccttttttgaggctgtattttttacttcgtggattgttttggtaaaataaataataaattatatttaataaaggttgtcagggcaactcataatgaacgttgttgatgattattagtgaaagttagttgaaatatataatttaatactatagactatttatattgctttaaatcgaagtacggttaagattagctgactaagtattatttagatcggctatcttagaacacggaagaattgaagtactgaatagtgtgagtatgaaacttatcgatggttaactattgatactgaaagtttcagcatgtaggaggaatagaaatggatacgagtaataacaccgatttactcggtagcacatcagcagattttatggaattcgcaggtttataccggtggttgattaacaaccttagcgaatcaatgagtcgtgaaagccaaaaatacggtttatctttcgaccaatttttagtgatgcacgagattcaaaatgcgaataatgaaacaactaacagtgcattggcagataagatgcaagtgagtcgttcagcgatttcacgtcaatgtcgttcattacgtaagatggcttttatcgcagaacaatctgatgaaaatgaccaacgcattcgtcgtgttcatttgacggaaaagggtttggaagtttatcgtcatctcttgttctattacgtagacttgtacaaagatttacaaaatgaaatcggccaagatactgttggcgcaacaatcgaccaaagcaaaaaaatctttggtcgcatggcatcaatgaacatggatcgcccagaagcaaaataaacgttaaaaaaggccacaaccatttgttgcggcctttttttgtgcgacggatttacaattcaagtgcaacaaattagtcaaatagaaaagactcatagcctgagtccttgtaaaatggaatcaccacaagaccaactacaaggagaactcgactatgagtccgtacacccatcttaccttaaaagaccgtgaatcgatactgcttggtatctctacaggcaaaactcttgataccatcgccaaagagataggtcgttccaagagtacagtcagccgtgaaattgcacgtaacggcggctggcggagctattcggcagccaccgctcaggaccgctaccggcgggttcgcttggctagcaggcgtcctcggatcctcgatcgaccggggactcgtgacgctgtcattcgatatatcacggtgctacattggtcgcctgagcagattgccggtcgcttgtcactagaaggcagtcctattcgcatcagctattcgactatctacagaggtatctacctagataatctcggcgttccattgaagagccatggtgctcgcgggctaccaaggctgcttcgacaccgaggcaagacgcgcaaaatcaaaggcaccataaatgaacgccgggggcgcttcaatgacgtgccatcaattcacgaccgaccccggtcggcagaaaatcgcagctggtttggtcactgggaaggcgatacagtacgcggtaaaacaggacactctgcattagtaacattagttgaccgtaaatcacgctatctgctttcgaagcgaacggccaacgcaaaagctgacactgttagagacgtcatgattgagctgcttggtgccttaccagctaaccgagtaagaacagtgactcctgaccgtggaagggagtttgcccggtacagggagctggcagaacgtctgaatacaaaggtcttctttcctgacccacacgcgcctcaacaacgaggaactaacgaaaacaccaacggactgattagagaatactttcccaagaacacagacctagaccttcagagcgaccaggaaattgagacttacattgaacaactgaataatcgaccacgcaaggtcttaggctggaagacgccatcagaagtcttcatgggtaaaaagttgcacttaagttgacaattcgtcgcgattagcaacggtcgcgcataatgacgcgcgtcactttctttgttagaatagagctagtcactttacgaatgtaggaggaacaacatgggttctcaaaaaaaattattattagtcgacggcaatagtgttgcatttcgtgctttttttgcaatgcaccaagctttagaccatttcaccaatcaggcaggactgcacactaatgcgatttatgctttcaagaatatgttggatattattctgaaaaagattgaaccaacacacgtgttagttgcttttgatgcgggcaaaaccacttttagaaccgaacaatttgccgactacaaagggggccgttcaaaaacgccacctgaattaacggaacaatttccttatattagagaactcttaacagcatatggtattcagtcttatgaactcgctaatttcgaagcggacgatatcattggtacacttgctaaacaagcagaagctgatggtttcacggtcgatatcgtcactggtgatcgcgatttaactcaattgacgactagtcagacaaccgttaacatcactgttaaaggggtcaatgaaattgaagcgtatacccctgaacacgttcaagaaaaactcggtttagaaccaagccaaattatcgatttaaaaggattgatgggcgatacctctgataattatcccggggtgacaaaggtcggggaaaagactgcgcttaaattgattacggaatttggaaacattgaaggtgtctatgaacatgtcgatgaaatgaaaaagagtaaattgaaagaacatttgattgaagatcgcgacctagctttcacgagtaagacactggcaaccattaaacgtgacgcgccaattacgattggcttagacgatgtggtgtacaacggacctgatatggcagctttggttgctttttaccaagaaatgaacttcaagtcgtttctaaatcaattagatgttgcaccagttgaacccacggctactgaagactatcaatttacagtattaacccttgataacatcgccgatgtcgtgacaaccactgaaaacgttgcgtttggcatcgaaatgttaaccgacaattaccatacagcagacttgattggcttttacattggccgaccagaccactggtatgtcagcgacgacgcaacactcttgacagaatcggttttaaaaacgtggttagaagatgctaaacgtccgaaagcagtttttgacgtgaaacgcaatcaggttgcggtgaatcgcttagggattcacttagcgggggttcaatttgacttactattagcgtcttatttgttgaatacaacgaataacagtaatgatcttggaacggttgcaaatttacatcagtatcaaaatgtccaaacagatgaagctgtttatggcaagggggctaaacgcgcagcccctgtcgatccaaccgtgctttatcaacatctgattcaaaaagcagcagctatttacaaattagcaccacaattgacagaacaattaaaaaaacatcaacaattcgatttattcacggatatggaattgccattagcgctagttttagcggatatggaaatcaccgggattcgagttgatgcaagtcgcctacaacaaatggggggcgagttcagtcaaacgctgaagattttggaagaaaagatttatgcggaagctggcgaaacgtttaacatcaattcgcctaagcaactgggcgtcattctattcgaaaagatggggttaccagtgattaagaagaccaagaccggctattcaacggcggtggatgtcttggaacaacttaaaaaagacgcaccaattgtccaaaccatcttggattatcgccaaatcgctaagattcagtcaacgtatgtcgaaggattattgaagtcaattcatcaagataataaggtgcatacgcgttacttgcaaaccttaacgcagactggtcgcttgtcatcggttgatcccaacttacaaaatattccagtccgtctagcggaaggccgtaagattcgccaagcgtttgttccaagtcaaccgggttggcagatgtttgcttctgattactcccaaattgaattacgagttttagcccacatttcgggggatgccaatatgcaagaggcattcaaggaagaccgcgatatccatgcgaatactgcgatgaagatttttggcttatcgagcgctgatgaagtgacaccagatatgcggcgccaagcgaaagcaactaatttcgggattgtttacgggattagtgactatggcttatcacaaaatattgggatcacaagggctgaagctaaacgctttattgaagcgtattttgaacagtatccaggtgttcatcaattcatgcaagatatcgtgaagaaggcgcgcgaagaaggctacgttgaaacgctcttccatcggcgtcgctatttaccagatattcacgctaaaaacttcaatttgcgctcatttgcagaacgcacggcaatgaataccccaattcaagggagtgccgctgatattattaagatggcaatgatcttgatgcaagcggaactgaagaaggcaggattacaagccaagatgcttttacaagtacatgatgaattgatttttgaagcaccagaatcagaaataccaatgttagaaaaattagtaccaaatgtcatggattctgcggtttcattagcggtgcctctgaaagttgaaagtggctttggaccaacttggtacgatattaagaaataaggggacacacaatgccagaattaccagaagttgaaaatgtgcgccgcggattggaacaattagtggtcggtaagacggttcaagcaattgagattcgctggtcgaaaattatcagtaatccagacgatgtttttgttgaaggtcttgttggacgccaaattatcggtgttgatcgacgcggtaagtatttattgattcgtttcgatcaaaacttaactgttgtgagtcatttgcggatggaaggcaaatacgaagttgatgatcaatccgtaccaatgactaagcacacgcatgtgatttggacatttacagatggacaacagttacgttatcttgattcacgtaagtttggccgaatgttattaattgaaacgggtcaagaaaacactgtttctggattgaaggacttaggggttgaaccaaccccaacaacgtttaagaaaaccgccttctatcaggcgttacagaaacataaaaaagcgattaaaccactgttgctggatcaaaaaattgtaacgggccttgggaatatctatgtggacgaaacgttgtggttgagccagattcacccagaaacaccggcgaatttattgacgaaagctgaaacagatcgtttgcatgatgaaatcatcacagagttagaactggcaaccaataacggtgggacaacagtcaatacgttcttaaacgcggcgggtcacgctggggcctttcaggatatgttgcacgtctatggtaagaaagggcaaccgtgtgatcggtgccagactccgattgagaaaattaaagtagcacagcgtggcacgcatttctgtccgcggtgtcagattaagagagaagcggttcaatgacgtattttctaggtttaacgggtggcattgccagtgggaagtcgactgttgcggcattgtttaaagaacagggaatcccggtgattgatgctgatcaagttgctcatcaggtattagcgactaataaatcggtacagacacaattgcaagcagcctttggcgaagcagttgtcaaaaatggtcaagttgatcggcctatgttgggccagcaagtcttcggtaacccagaggctttgactcagttaaatgcgattactgggcccgctattttgacagccattaaacaacagatgcaagcagcagatgcaccgctggttgtgttggatgtgccactgttatatgaacaacactacgagcaatattgcgatggtgttgcagttgtctacgttgaacgtaaaacacaattgcaacgtttgatggcgcgtaaccaattgactatagaacaggcaaatgcgcgaattgatagtcaaagtgatttggcgaccaaaaaagcgcgagcggatttcgtgattgataatcaaggcacacctgcaatgttgcggcaacgtgttttggcgttgttacaacagttgtgtcataacaagtaatacaagcggtcgaacagattattctgttcgaccgcttttttgtttggaaaaggcgaaatgccttgagactgatacattttttgtttagcctgcttgcctggcatgttatactactgttatactaattgttttaaaattggattgaatttgaaacgaattaatcaaaagataagaaggtgtcattatgctatgtccacattgtcatcagaatagttcgcgggtaattgatagtcgtcccacggatgaagggcgagtgattcgtcgtcgccgtgagtgtgagaattgtcgtttccggtttacaacgttcgaacgagtggaacaaaccccattgttggtaatcaagaaaaacggaacgcgcgaagaattcaaccgtgataaattattgcgcgggctaattcgtgctgctgaaaaacgccccgttacaatggagcaaatgactgaagtagttgatgaagttgagaataagattcgctcattgggtgaaaacgaagtctcttcacaagccgtcggagaatacgtgatgcgcttgttaccagatattgatcagattgcctacattcgctttgccagtgtttatcgcgaattcaaggatatgaatgtctttatgagtgaattacaagaaatgatgaataaagaaaagacgaagaaatcgaattaaggaagaggggttagccgatgtcagatgcatttgattttttgagtccaaaagacggcttttcagtgacaaaagctaactatttgaccgatttcgatcaaacagtcgtcacttacttatatcaaccattgatgggggctgttgcttacagtctctatcttttgttatggagtcaaaccaagaaagaaacggaacaacattttcaaacacatgcgactttgttaaatctgttgagtgttgatttacctgctttttatgacagccgcagcaaattggaagcacttggtttaatgcggacgtatcaaaaaaatgagggaactggccgcaagttggtgtatgaactgtatgcgccattgcaaccacaagctttttttaacgatgatttgttaagtgtggcattgttcgaagcggtccgcgaaacacggtttgtggaactccgtgactatttcaagctacgaccggtttacgccaaggattatcaagaggtcactaagaatttcttgaccgttttccatgtgcaaaacgatttattgacgaccgcgccaagcagtgtggctgaaactaaggcaatgtatcaacaaaaagcagctagcacaccgcagtttacctcggttgagttgcggacttttgattgggacctattacaagatgtaacggcgcaataccagattgatacggatcaaattctcaaaaatgaacagggcttgtttaatctccattatttctatggtctagatgagatggacttagcgcgtttgattggcttgacgatgaatgttgctgacagtacgattaatatggcagcgctcgaacagaacgtcttgaacaattacacacgacgtcagagtaaccggcaaacgccagctgctacaacaacgcaaaaaccgttagccgagttacaaaaagaatggcaaaaagccggctttaacgaacaggaattgcagtggctaacagaaagtcagggctacttgccagttgattatctcgaatacttgaaacaaaagaaccacggctttgtcgctaaaaatgaaatccgggcgttaaaggacttgcaaaaccgctatatctttaacaatgatgtgctcaatattttggtcgtttatatcattacgcaatatgatgggctcactcaggcgctagtcgatcggattgcgaaccagtgggctcaacaaggggttaagacggcagcggatgcgattttgcagattcgcgatttccaaaccaaacagacggcaaaggtgcaaaacaatcgccaaacgcgttatcagaacaaaactaaaaaagaaccagtacctaaatgggctaaaccagattatcaagcgccaaaagaaacaaccacacctgagcatcagcatgaactagaagtggcgttgaaaaaaattcgtgaggggcgggaatcgtaatggaaaatatgggtaaagatttgacggattacatgaatcggcaaaagttaaaccaacagtttaataaattggtcgaagatgccttgaacgattccgatgtccaagcatttatacaagctaacaaagaccgcttatcacaagaaacggtcacgcgtagtgccgctaaaatttacgaatacgtcatcgaaaagaagaagttagctaatgggcaaaccactttggcaccgggttatgcgccaaagttagtcttaaataaccattttatcgatgtcagttatgagcctacggcaagtttattacaagagcgcgaacaagctgccttgcatgcacgagtgaagtcaattaatatgccgcgcgatattgaacaggccaagattgattcatacgatccaaccaatcggtttgacgcattgatcaaagctaccgcgtttatcggggcttatcggcaagcaccccatgattttcaccaagccttgtaccttagcgggcaattcggggttggcaagacttacttgttaggtgcgattgccaacgaactggcgttatccgggtttgaaaccacgttgattcatttcccgacattttcagtggagatgaagaatgcaattgggcaaaacaatgtgttagaaaaggttaacgtgataaaaaaagcaccgattctgatgattgatgatatcggtgctgatgcaatgagtgcgtgggttcgggatgaagtacttggcattattttgcaatatcgaatgcaagaacaactcgccaccttcttcagttcaaacttcacaatgactgaattagagacgcatttgacaactagcaaccaaggagacgaaccggttaaagcggcccgcatcatgcaacgtgtgcgctatttagcgcaagaaattgaagttggtggtcaaaatcgccgcttacaaccttagtaatttaggcttgctaaaaaagcaattaagtgttttaatagaatcaatcaatgatgaaagacaccttttaaatgaaccatcgcagagagaaaaacatagctgaaagtttttcacccccatttaattgaccactttcaaaggcaatacaactgatcgggtcgtttccgttatagacgcttaaagttggagaaccaaatgttggggtctcaatctgggtggaaccgcgaaattaattcgtccctgagctgcacaattcgtgcgtctcagggactttttttattgttgatgacaaattagaaggagtgaatagtaatggcagagattcaattaacttttccagatggtgcccaaaaggcatttgaacaagcaacaagtcttttagatgttgctaaatcaattagtacaagcttagctaaaaaggcaattgccggtaaattgaacggtgaattagttgatttacagcaaccaattttagaagatggggcaattgaaatcatcactaaagacgacaaagcaaccgatttgatggcaatttggaatacggcagcctttgttttagctgcaacgttgaaccgtgcttatcccgagatgcaattcggcgaagtacatgcaactgaagatggcttcttctatgataccgaaaacgaagctggtcaagtagctgtgaccgacttaccagacattaaaaaagcaatgagcaagttaatccaagctggcggggcaatcgaacgtgtcagcttagacaaagctgctgctaaaacactatttgctgggcaaacttacaaattagcattattagatgaaatggaaacagaccaagtcttagtttacaaattaggcgattttgctgattttgggttagcaccaatgctagctaaagtgagcgacgttaaggtctttgaactcttatcggttgccggcgcttattggcaaggtaaatcaagtaataagatgttacaacggatttacggaacagcttacaacaaacaagctgacttagatgctgacttacagcgtcgtcaagaagctaaagaacgtgatcaccgtgtgattgggaaccaattagacttattctttgttgatcctaaggttggtgcgggcttgccttattggttgccaaatggtgctaccatccgacgttcaatcgaacggtacatcattgataaagaagttgccaatggttatgaacatgtttacacaccaattctagcgaacttagatttgtacaaacaatcaggtcactgggatcactaccgtgaggacatgttcccaccaatggatatgggcgatggcgaaatgcttgaattacgcccaatgaactgcccatcacatatccaagtttacaaacaccacccacgttcatatcgtgaattaccaattcggttagctgaactagggatgatgcaccgctatgaaaaatcaggtgcgctttcagggttacaacgggtgcgtgaaatgactttaaatgatggacatacattcgttcgtcctgaccaaattcaagatgaattcaagtcaattttgaaattaatgattgaagtgtactcagacttcaatatcaacgattatacattccgtttgagctaccgcgatcctgctaataccgaaaagtactatgctgatgatgaaatgtggaacaaagcacaaacgatgttaaaaggtgctatggatgatcttggtttagattacgttgaagctgaaggcgaagctgctttctacggtcctaagttggatgttcaaacgaagacagctatgggcaatgaagaaacactttcaacaatccaattagacttcatgttgccagaacggtttgaattacaatatgttggcgaagatggcgaaatgcaccgtccagttatgattcaccgtggtttagtatcaacgatggaacgtttcacagcttacttaacagaaatctacaagggcgctttcccaacatggttagcaccaactcaagctgtgattattcccgttaagaatgaattacattatgattatgcaaagaacgtcaaagatgcgatgatcaaacatggtttacgtgtgcgcattgatgatcgtaatgaaaagatgggttataagattcgtgaagcccaaacaagcaagattccttatacattagttgttggggatcaagaagttgctgacgcaacggtttctgtccgtaaatacggtgaagaaaacgctgctgaagaagcttcagacatgtttgtagatgcaatcgttgctgaagttggtaactacagtcgcgatggtaaagatcacaaaacaatcaacctataagcggttattaaaacgtccgaaatgttattttgacatttcggacgtttttttgtttttttaattgcgcacaactaaaaaagcggtataataaatatgtaaacggttccaatcgttgattaatgggaggcgttattatgacgacagaaaaatatcaagcaggttcagcagagcaaccattggacattattaacctctatgacttggaaaaagaagccggcgaagttgttcccaagggtggctttgggtatatttacagtggcgcgggtgatctttataccattaacgaaaatattacggcatttaatcacaaatacatcgcaccacgggttttacaagatatcgaaaatccagatacaactaccgaaatctttggcgatcacttaacatcaccaatcattatggcacctgttgcagctcataagttagtgaatactaaaggggaagcggcaaccgctaaaggtgtggctgattacggttcaatcttaaccatgagttcatttgcgtcagcaagtatcgatgatatggcaaccgcagcagatggcgcaccgcaatggttccaactctatatgagtaaggataacgatatcaatcgtaagattttagatgaagcgatggcgcataacgttaaagcgattgtcttaacagctgatgccacagttggtggtaaccgcgaaaccgataaacgcaatcattttacattcccagtcgggttaccaatcgttgaagcttaccaaacaggtgtgggccaaacaatggatgccgtctacaaatcagctaaacaacgtttgaaccctaaagatgttgaattcatttctgaatacacacatttaccagtctttgttaaagggattcaaacagcagaagacgttgaaattgcacttcaagccggtgctaaagggatttgggtatccaaccacggtggtcgtcaattagacggtggccctgcagcctttgattcattacacgtcgttgctaaggcagttaataaacgggtaccaatcgtctttgatagtggtgtgcgtcgtggtcaacacgtctttaaagcattggctgaaggggcagacatcgttgcaatcgggcgcccagtcatttacggattagcacttggcggtgcacaaggggtacaaagtgtctttaactacttgcaaaaagaattagaattagtcatgcaattagctggtacacacaacattgacgaagtaaaagccacgcacttagtggacaatcattacggcaactaagtacacgtaaatttaaatgcgggatttccttgactttaaattcctaaccgagtatacttattttcgttgagaaataaagcagaagttcccgcttctcgccttagtagacacttgatgtctctgggctgatagtttctaattcggacgaactaagtaaccgaacaagcgggcctttctgttatgagagggccgctttttttattacttagctgcattttctctctaaactttatggaggtgaagagtcatagcaaaagatttgatggttaacgatggtattcgtgcacgagaattgcgtttgattgctcaagatggcgaacaacttggtattaagagtactcaagatgcaattgcattagctgatcaagctaatatggatgttgttttggtttcaccaaacgcaaaaccacccgttgctcgtattatggactatggtaagtaccgtttcgagcttcaaaagaaacaacgtgacgctcgtaagaagcagaaaaccattaacctcaaagaggttcgtcttagtcccacaattgaacaaaatgattttaatactaagttgaacaatgcacgtaagttccttggcaaaggcgataaagtgaaagcttctattcgtttcaaggggcgcgcaattacgcataaagaaattgggcaacgtgtattggaaagacttgctaaagaaacagaggacatcgctaaagttacagcacgtcctaaaatggatggccgtagcatgttcttaatgttagaaccgctaaaggaccaaaaataaaaaatctgtttctgatttattaggaggaaatatcatgccaaaatttaagacacaccgtgcttcagcaaaacgttttaaacgtacaggtaatggcggcctaaaacgcagccacgcctacacaagtcaccgtttccacggcaagactaagaaacaacgtcgtcaattaagaaaatctggaatggtttcaaatagcgatatgagacgtatccgtcaaatgttatcaggccttaaataagccatagcattttcggattcaagcaaaaattagatcagtacagcaacgctttgacgttgtttgttattcaaggaggaaattcttatgccacgtgttaaaggtggaacagtgacgcgcaaacgtcgtaaaaagattttaaaattagccaagggttatcgcggcgctaaacatttattattcaaatcagcaaatactcaagtaatggtttcataccgttatgcattccgtgatcgtcgtcaacgtaaacgtgacttccgtaagttatggattgctcgtatcaatgctgctgctcgtatgaacaacatctcatacagccaattaatgcacggtttaagagtcgctgaaatcgacatgaaccgtaagatgttagctgacttagctgttaacgatgctgctgcatttacatcagttgttgaagctgctaaagctgcattaaacaaataattaaagatcaaaaaaagagtctgggacaaaacttcgttttgttctagactctttcttttatcattataaaattagtggctaataacaatcttacctggggcatgatgactctcaaggagcttgtgaccttcaataatgccttccaaagtaaatgggagcgtcttgaagacggtattgtgtagtaaaccttgatcgatcaattcatttaaatcttgtaaggcggttaaatctgcataatccttacgcggatagacagattggtaattgatgtcagcgcgttgttgatcgtctgttggtaagatggtcgttgaagtgaatgtgccacctggtgcaactaagttattgaggcgttcagttgattctggatcgcgacttaagttgataccgattttagcggtctgcgcaagtcgttcgaagtcagatggctgatcataagcaattacttcttggacaccgaatgagcgcagatagtctaggttagcactattggcaattgcaatcacgtttaaatgagctgctaagcttaattgaacgagtaaactaccaacggcaccactggcacccataatagcgattgtatcgccgtgtttaaagtttgtgaagtgcatcagcgtattgtaagcagtgatgccggcactgggtaaaccggctgcttcagcgatactcatgctggctggcttacggagaatcttcgcagtactagccgttacgtattcgctataagcacccattgatcggtgattgatgacgatttcgccaacgcggtaatcatcgacgtcagcaccaagttcaacgatttcaccaaccacatctgtaccaggaaagattgggaagggtaatgggcgcactgaatcttgtgaaccattccgtagtgcaacatcgtatggattcaatccagcagcgagcactttaatgaggacttggttgtcctttggagttggttgaggctgatcgaaacgttcgaaaacgtcagggccgccaaagtgattaaaaccgaatttttccataacaaacacatcctctcaatttctttaaacgtaccagagttggggctaaaagtcgattagtttgacttatggatttaaatggattaggaattagttggaaattatggaaattaaccgcgtaaaggtgcaatttggtgtcaaataccctataattaatcagtgactagattaaaaagaagtgcgtcagtaggcggttatatttcgaggactagcctagtctggcgaatgaccaacttgttggtcgtttgacggacgtcgctagccgcaaaaatatgcctactgaggcacgttagaaaagaagtgcgttcaaacctggtatactccgagcactagcctaacaaggcgaatgattgctgcaagtaatcgtttgacttgtgtcgctaggcacaggaatatggtttgaaaagcacgttaaagaaaagaagtgcgtcatccacggttagcttccgagcatttgcctaacttagcgaattggcgctgcaagcgccgatttgataagtgtagcaaagcgcaagaagctgttgatgaaagcacattaaagtcgaggggacagtacatgctaaagaatttcaagccaacttggatggtcaatgccatctacgacttaacaccagaacaacttaaggcaaaagggattaaggccgttttaacggatttagataatacgttaattgcgtggaataaccccgatggcacaccacagttaaaagcttggttagcacagatgcaagctgccgaaatcaccgtgatggttgtttcaaataacaaccatgatcgcgtgcaacgcgcgctcagtgaattgcaattaccattcattgctcgggcgaacaagccattggcaactgggattaccaaagcgaagaagcagcttggcctttcgcgacatgaagtggtgatggtcggcgatcaattgattaccgatatgcatgccggtaatgtggctggcgtccggacgatattggtcaaacccattattgacagtgatgcctggaatacatcgattaatcgattctttgaaaaatatattatgcaacaactactaaaaaaacacgcagatttaacttggcgggaggatttaaatgactgaaacacaacaaactgaggaagaactattttgtattggctgtggcgctcgcatccaaacaacggacaaagaagcactcggctatacgcctaattcagcgcttaaaaaaggcttggaaacgggtcaattgtattgccaacgttgttttagattacgacactacaacgaaatcagtgatatcaaattaaatgatgatgatttcttagccttattgaaccaaattggcgacagtgacgcgttgatcgtgaacgtcgtcgatatcttcgattttaacgggagtttaattccagggttacatcgttttatcggcgataaccccgtgattttagtggggaataaggttgatatcttaccatctgctcttaacccaaataaagtgatcaattggattcaaaaagaagcgaaagaacatggcttacatccggttgaaacgatgttggtcagtgctaaaaaagggaattcagttgatgaattattggccgtgattgaacgcgaacgtaaaggccgcgatgtctatgttgttggggtgacgaacgttggtaaatcaacgttgattaaccgcattatcaagcaaactgggattttagatagcgacgtgattacgacgtcacaattcccaggaacgactttagatcgcatcgatattccattgtatgaagatgatcatgcattgattgatacaccagggattatgcatgcccaacaaatggcgcattatttacatgataaagacttacggttgattgcgccgcaaaagcggattaaaccaaaagtataccaattaaatgaacaacaaacattgttcttgggtgggttagctcgttttgatttcattcaaggtgcacggcatggctttgtcggttattttgacaatgaactttacattcaccggactaaacttgaaaatgcagatcaattctacgctaagcaattaggggacatgctacagccaccacatccagaagatttagctgattttccagaactccaacggtatgaattctcaacaaagcaaaagagtgatttagtgtttgctgggttaggctggattacgttaccagaaaatgtcgtggttgcgggatatgcgcctaaaggtgtctcagtcatgattcggaaagcattaatttaattagggaaggaagtatcgcacgtgttaacaggcaaacaaaaacattacttacgcggtttagcgcaaaccactaaaccactttttcaactaggcaaaaacggcttaagccaaacttatttcgaacaaattgaagaggccatcgaaaaacgagaactcgttaagattaacttgttacaaacaacagaagtgaccgttgatgaattagccaacttcttaaaacaacatgacagtcgcatcgaaattgcgcaaaaaattggacgcacattggtgatttataaagcttcacggaaagaaaaataccaaaagatttcaacgattgttactaagctcggacgctaataaggcggtgatcagatgcaaagtgcaacgctaaagcagacaaatcatgtgactgaaccggacgtgttggttgtagaagatggccatcgcttgcaagtcggcattatggggggcacatttaacccgccacacatcggtcatttagtgatggcagaacaagttcgtagccaactcggtctcgataaaattttgtttatgccagatgccaatccaccgcacgttgatgagaaaaaaacattaccagcaaaacaccgtgttgcaatggtagaacgtgccatcgctgacaattcgcattttgaactcgatttaacggagattgaacgtggcggtgtcagttacacctacgatacgatcgtggcattaaaacaacaacaccctgaaatcgattattatttcatcattggcggtgatatggtcgactacttgcctacttggtatcgaattgatgatttagtgcagttagtccaatttgttggtgttaaacgaacagggtatgctcaacaaacgccgtatccagtcttatgggtggacgcaccggtaattgatgtcagttcaacgcaaattcgcaataagattcaacaaggctgttcagtgcggtacttgttaccggacccagtctttgaatacattcaaaaagagggcctctatcatgagtgattttgtttatcaagaaaacatcgtgccgtatacacgggctgagttagtggctaaagttgccgctaacttatctgaaagccgatttgaacattgtttgcgtgtggaagccaccgcgattcaattagcacaaaaaaatggcgcagatgttgaacgcgcggcaattgctggtttagtgcatgactatgctaagcaattaccagatgaaacgttcattgaagcgattaaaacgcaaggctttgatccagaactactcaattacggtaatgccatctggcacggtgttgttggtgcttatttcattgaacgtgatttagaaatccatgatgaaacgattttaaatgctgtgcgtcgtcatacgattggtgcgccagaaatgaccttgattgatcagattttatttgtggcggattttgtcgaacctgggcgcaattttccgggcgcagaagctgctcgtgagacagcaatggctgatttagcagccggcgtgcggtatgaaatcttaaatacattgacctttttaattcagggcaagaagcagatttatccgaaaacaatcgacacatacaatgcttgggtaccgactcaagccaaataaaggagaactttagtgaaaagtttagatattttaaaaattgctgtgcaagcagctgatagcaaacgagcagaagacatcgtcgcaatgaacatggaaggcatcagtttattagctgattacttcgtgatgttaactgggacgtcagaacgtcaattaggcgcaattattgacgccattgaagacgcagaagaagaaaatggcgttttcgtaaaacacatcgaaggtaaaaagggttcacgttggatcttgatggactttggcgatatcgttgtcaatgccttcatgccagaagaacgtgccttatacaaccttgaaaaactttgggatcaagcaccacttgttgatgtttccgaatggttggatgaagaatgatttaccaaagctttgcaaccgtctatgaccgtttgatggaccattcattatatggtcaatggcgggattacacgttgcagacgttacaaaataaacatcgagtcctagaactagcttgtggggctggtgatttagccatcttgctaaaacaagcagggctagaggttgtcggcttagatttatcggccgagatgttgagtatcgcttctgaaaaggcttctgaagccgaggtcgagttacctttattacaaggcgacatgcttgacttaggcgaaattgggacgtttgaagcggtcacttgttttgacgactcgatctgttacatgccagatttagcgcatgtccaacaagtttttgaacaagtttatcgaaatttagagccaggtggtcaatttctatttgatgcccattcactttatcaaatggatgagcttttcccaggttttatgtataacgataagacggcagaaacggccttcatgtggacgagttacgcaggtgaagtaccacattcagttgaacatgatctcagcttttttatctgggatgacgagattgacggttatcaagaacttaatgaattacaccatgaacgaacttatccggtggtagattatgttgcagcattagaagctgctgggttcaagaatgtatcagtcagtgctgattttggccaagaagccgttcaagaagatagtgtgcgttggttctttagcgcagtgaaataggcggaggacgcatgagaattacggggattattgcggaatataatccgctacataatggacatcggtatcaattgcaacaggcgcgggtagcttcgcacgcagatttagtgattgtctgcatgagcggtaactatgtgcaaagaggtgaacccgcgattttggacaaatggacgcgcgcacaacttgctttgagcaatggtgctgatatggtcgttgaattgccgtttgccagtgctgtccaacctgcagaccgttttgctgatggggccgtcaagttattggcggcgcttggttgtcagaccttagcgtttggcagtgaatatccaacgtttgactatcagcaagtcgggcaacagattttagctttaaaggccaagtcacagacgtttattgattatcaaaaaacttatgcgacgcagctcaatgagttttatcaagcagaattaaatttaaatttagatcaacccaatcacctcttaggggtcagttatgcggttgccaacgcgcaacttgaagtgccaatgcagttgcttgcgattaagcgtgagcaggcacaacacggcgatcaaacgattggcgcgggacaatttgctagtgccagtgctatccgacaggcggcaacaaagggtgatgactgggcacagttagccccagtgatgccgcattcgactttaacagcgctccagactcaatcgcatctggattgggaccaactatggccgctattgaaataccgaattgaaagtacaccccttgcccaacttcggcagatttatcagatgtcagagggcttggagtaccgtttcaaaaaggtgattcattcagtcaatcggtatgccgagttgttacaggcacttaaaacaaagcgatatacgtatgcacgcttgcaacgggtttgtttatacgtcctgttgaatattcaacaaacggatattgaacaatcattagcgcagcggcccatccatttgcttggctttaaccaagtcggccaggcgcatttgcacacgttgaaaaaaacgctcgatcaaccacttatcagtaaggtctcagctaaattgggtaccgaagagggcccactggggttagaggtgcgagttgatcgattacaagaacagtttggctggcaatcacagaattttgcccgccaaccgatttttaaccaaagaaaggatgacgagcattgttaaaatggacagtccaatcattattaaaacatcgtgatcatccattgatgtttaaagaaacattgatgttaaaagaaagtttacaaaaaagagaagctgatgtcctagatgctacaccatttgtagtagacggtggattaacggttgaccagcgcgctgtaattgcacgcgtacatgtggtcgggacattaacagtgccatcaacgcggagtttagatccagtagccttgccaatggattttgaattcactgaaatctacgttgatccagaagacgagcagttgggacgatttacggacgaagatattttgttcccaatcgaaggcgaagccctagagctacaggtagctgttgaagatcacattctcttgcacattccaagtcacatcctaacaccagaagaagaacaagatgatgtgatgccagccggacagtcgtggtcagtcatttctgaagaagcctatgctaagcaacaggctgaagaagaaacggcacccaatcctgaatttgctaagcttaaacaattattagaagaacaaaacaatgacgccgactaagtttggcgtttttttatacccaatttgttaaatggaccggaccaaatcagttaaaatgcttttatttaaagcgtaattctgctaacataaacacagtagacgcgttgtcgttttgatagtcaacaacgcttaaatttagaaatcatttaggaggccttttacatgagtcaaccacaaatcggtgtcatcgggatggcagttatgggcaagaacttagcattaaacattgaaagtcgcggttacaccgttgcgatttataaccgaacaggtgctaagacagaagcagtgatgcaagatcacagcgaaaagaaattggtaccaagctatacaattgaagaatttgttcaatcattagaaaaaccacggcgaatcatcttaatggttaaagccggcgctggtacagatgctgtcatcaacgaattgttacctttattagataaaggtgatattttaatcgatggcgggaacaccttctttggcgatacaattcgtcggaatgctgaactagataagtcaggcattaactttatcggaatgggtgtttctggtggtgaattaggcgcattagaaggcccttcaatgatgccaggcggtcaaaaagaagcttatgaattagttgcaccaatcttagaacaaatgtcagcaaaggctgaagatggccaaccatgtgtcacatacatcgggccaaacggtgctggtcactatgttaagatggtccacaacgggatcgaatatggtgatatggaactcatctcagaaagttataatttattgagaaacgttgttggtttatctgttgaagaaatcgctgatgtcttcaaagaatggaaccacggcgaattagacagttatttaatggaaatcacagcggacatcttaacgcgaaaagatgatttagaaacggataaaccaattgtcgacgtcatcttagattctgctggtaacaaaggaactggtaagtggagttcacaaagcgcccttgaattgggtgtgccacaatcattgattacagaatctgtttatgcacgttatatttcagcaatgaaagacgaacgggtggctgcaagcaagattttaccagccccaaccgttgctaaattaacagaagataaaaaagaattaatcgaaaagattcgccaagcattgtacttcagcaagatcatgagctatgcgcaaggctttgaacaaatgcgggttgcttcagatcaatatgactggtcattaaactatggcgaaatcgctaagatctggcgtgaaggctgtatcattcgggcccgtttcttacaaaagattacggatgcctttgataaaaaagctgatttaaacaacttattgttggatgattacttcttagatattacaaagaattatcaaggcgctgttcgtgacgtagctgcaatggccatccaacaaggtgtgccagcacctggtttctcagctgctatcacatattttgattcatatcgttcagaagtattaccagcaaacttaatccaagcacaacgcgactactttggtgcgcacacataccaaagaacagaccgcgaaggcacattccattatacttggtataaagaacaatagagtgcgcaagtagacggggatgcgctgaggattagtggaatatcgtaaatgagcggtgaaaccgatcgtttgcggtatgcaactaaccggaagcggatgtctactggagcacgttttagtacaagagtgctgactattgcatttagtcattgagcattaataaaaaattgccattaatcccggttttaggattaatggcaattttagattaagcggaaatggctgcgacgggatgcgcgttttaaaatagagtgatgagtcgaacgtttttggctttaaggattaacagaaaaatgatgcttatggcggttcttagccataagcatcattttacggttaaccggaaaagacagttcgaggaagcacgtttctctaaacacccgagccgattattaaggcgcaggtgttttttcgattattactaaatcgccatcagatgagagtcagattagttagttatttaattggaactatgctagaatggaaaggtaagccgattttggcgcttgatgtttcttagagaattcttatcattgattagaatttagagagtccattaaaaattcttttttggggagtgactaaatgagtcgcatattgattattgaagatgagaaaaatttagctcgatttgtggaacttgaattaaagcatgagggttatgagacagaggtccatttcaatgggcgtactggtttagaagctgccttgaatgaagaatgggacgcgattttattagacttgatgttacctgaattaaacgggttagaagtctgccgtcgggtccgccaagttaagaatacgccaatcattatgatgacggctcgtgattcagtgattgaccgtgtttctgggttagatcatggcgcagacgattatatcgttaagccttttgccattgaagaattattagcgcgtttacgggcattgctacggcgaattgatatcgaaggcgaacataacgctgctaaacaaacgacggttacttaccgtgatttaacggttgaaaaagaaaaccgagttgttcggcgtggtgatgatgtgattgaactaacgaaacgtgaatatgaattattattaacattgatggaaaacgtcaacgttgttttggcacgcgatgtcttactcagcaaagtttggggttacgattcggatgttgaaaccaatgttgtcgatgtttatatccgttacttacgaaataaaattgatcgttctggcgaacaaagttacattcaaacggttcgtggaatgggttatgtgatgcgctcgtgatgcaggacgaaacggtagcatcaacaacaaataagggtcgtaaaatatcgttaaaggtcaaatgggcagctgcggttgggttggccatttttatcacctttgcgattttttcaattgtgatctttagtagtatctctaatatcttgctacacagagaagtcgacaatgtgcacgatacggtgaccgtcgtacaagcgagattgtccagcaatgggccacatcttacagaaggctttgtcaccaatcaattggatccgaaccgtcacagtcctaaagccatctatcaagatgcggttttaacgcggttagcacaacaggatgttacagttaagatttatgatgcaaacaagaagggtttgtttgcatcgcgcggggcgattggtccgtttccaaaaggcgatacggatacattaaagcgcaaagctatttttggtaagatgcggctgattggcattagtccgattaagacaagtcaaaaccgtgtaattggttatgtagaggtggtcaataacgtccgtgattataaccacgctatgactgaattaagaattgtgttagttgtggttgtcttttttgctatgttatttagtgcattgattggctatttattagccaaccaattcttgcgaccaatcgaagttatgaaaaaaacgatagaagccattaattcagagcctaattcagatgtccgaattcctgagactgggcatagtcaagatgaattatctgatctggtcagtgcgtttaatggtatgttgaatcgaattcagcattatttcgaacagcaagaccagttcgtcagtgatgtttcgcatgagttgcggacaccagttgcgattattgaagggcatctacaactgctcaatcgatgggggaaagatgatccagaggtactggaagaatctttagcggcttcgttacaagaaatcttgcggatgaaaaatttaattcaagaaatgcttgatttaacacgggcagataaagtcgtgactgaaggaacgactgaagtgaccgatgtcggggaagttgttcttcagaattaccataacttcgagatgttatatccagaatttaattttatgctcgacaatgatttgcaccaaccagcgctagtgcatgttaatcgaaatcacttagaacaaattatgattattctgttggataatgcgattaaatattcaacgatacgtaaagaagttcatattgccgtcgctagtgatgagcggtatgcgcaagtggccgtgcaagactttggtgaaggtatttcggaagaagataagaagaaagtctttcaccggttctatcgcgttgacaaagcacggagtcgggaaaaaggtggcaatggattgggattagcaattgcccaacaactcgttgaaggctatgacgggaatgtgtcgctagaaagtagcgttggctacggttctgtttttagagttgagttaccactgattcgtgaagtagaaccaaaatcagaagaaccagttaatacggattaaaaaagcggtgcgcttcaatcatctaattgattgaggcgcaccgcttttttttgttggttaagcttgtggcttatgccgttgcttacctgagttgcgtttgccagctactttaggtgtagcgacagttgggttgcttgtttctgttggtgtttctgtgacgtcggcagctggtttgactgctgctttttgagtgaacatttcttttgtgacaaccgtgacgattggtttttccttaatttcttgatcgatccgttttttaacacgaggcatgatgatgaatgtcgtgattaattgttgaatcaccatgataatcccaccggctaagaaataaagtgctaaaccggctggtgcaaataacgaaatgaagaatgtaatcgcaggactcattaggacggttgtttgcatttgtttcttttgttcagcaggcatcccgactaatgaaagtgcactttgaccgacatataagagggtcgcaatcacagtaatgataatgtttgggctcccaagaccgatcccaaagaagtggctacttgaaatttcaggtgagtattggatggcttgatacaaaccagagaagattggtaattgaattaataaggtcaaacaaccaagacttggcatcatgcttgaatcattttccttataaaccttcatcatcaactggctaagttcagccttttcttcaggggttgttgccgctttttgttgttcttggataatatctaattgcggtttcaagcgacgggtcttttcttgttgggccgtcatcttattcgattggttcaacattaatgggagtaaaatcatccgcacaacgaatgtgatgatgataattgcccagccgtaaccattgatgccaccgaaaacatcagcaatgcgttccataatatgttggagcggcacggcgatgtatttataggatgaaccatagattaagccggttgggactttgggatggctgctcattttttgtggaacacagccagcgagaaagaatgtaacggtcattgtaagcatcgcgagtgtcgcgaagcgtttagaatttttcataaatttagccctttcaagataagtttcaacaagtgtaactatacttgaaggggctaggtttttcaactgacaaccgaaaatttatgacacgctgacacattttcgagcggtgtttgaatgacacggtcgacgcgcccactaggggtgggagaagctttgacagcaccgataaatttttcgagtgcgtctgctgggcccatcgcaataattttaacggagccgtcgtcacgattggcaacggtacctgtgatatggagtttatcggcgaccaatttggtcatccagcgaaatccgacgccttgcacgcggccatagacttcaagttgaattgcattttgcattgtcatcacctcctcttcattgtaagctgttcaacccgatttggcgattaaaaagcgacccttgatagaatttacccactaagtcgcgtataatagaaagtactaaatagactggagcacaacatggaatacattcaatcgaatcaaaacactaaaattaaggcggctaagaaattaaccgttaagaaaaaccaacgtaaagaaaatacgtatctactagagggctggcatttagtccaagaagcaatccaaaataaggccgtcatccgccaagttttcgccactgaaaaatatgtggacgaacgcgcattgcgcggtctttacgatgaaacttttgaaattgcaccagaagtggcgcaacacttgagtgaaactaaagcaccccaaggcatttttgccgttgttgaaatgtctgaaacaccggtaccagaaaaattaacgggtcgttacttattattagatgctgttcaagatcctggtaatatcggcacaatgattcggacagccgacgcagcagactttgccggcgttgttttaggcaatggcagtgttgacttgtataatccaaaactcttgcggtcaatgcaaggcagtcacttccatttaccaatttatcaaggtaacttgatggactggatgaagaaattcaattcgcaagacgtcccagtttatggaacggaattaaatccagaggccatcagttatcaagatgtgcctaaagcaaatgacatggccttgattctaggtaatgaagggaacggcgtgaatgaaaacgtcttagcagccacaacgcaaaatatttacatcccaattccagggaatgctgaatcattaaacgtggcagtcgcagctgggattttaatgttcaagttgattgaagcttaattcttaattttttctaacaaatgtaactttttaaggcgtttaacttcttttttgaacgaaaagctgttatccttgtggcagaatttgaatttaaaaaatgtcaggagtctttgaatgaattcaacagcaaaatggtacgatgacgcggattacatggctctaattgccgatttattagctaaagatgaagtccaaaaattagcgaactatacgcaacatcatcattcagatcgtttggaacattcgctaagcgtctcttatcgcagttatgaacttgccaagaagtggcatcttgatacgcgagcaattgcacgcgcgggcttattacatgatttattctattatgactggcgtgatacgaagttcgatttaggcacacatgcttatatccatccgcgcattgcgcttcggaatgccgaaaaattaacagaactctcacctaaagaaaaagacatcatcgttaaacacatgtggggcgcaactgttagtcgtccgaaatataaggaaagttacattgtatcgatagtcgatgattattgtgctgtgacggaattttgtacaccaatgtggacgaaatttaaacaaaaagttctccgccaaacaccggcaattaacaagtaaagatgcttcaagctgataggttgctttttgcagcctttttcagtacacttcttattaataagtgtgaggtgaaaataatggtgattgtaaaagaaaacgcaaatgctgactgtcaagaggccttccaactgtgtcctaaatttgaaaagactttttcaattttaggtaagaagtggaacggcctgattatcgatgtcctattagaaaacggggcacaacggtttaaaaacttagtgcacagtgtgcctaagtgcagtgatcgcgtattggttgaacgattgaaggaactagaacaagaaggcattgttgcgcggattaccagtgatgattctgcgttgattgaatatcgattgaccactaaaggtgaagaattagcgccagtaatggctgctattcacgattggtcaaacgactggtatgcgacagaagcctagttgctaattgcggttatttacgttaaaatacaattattaaacaaagacgaaaaagagtaacctaatcattagttttcagggagaataatcagttgactgcaagttattcaactaagtttaggtgaagttcactttctgagttgaccattggtccggtattgcccgttagcgcaaacttgagtgtatgactggaatggtcgtaaactagggtggtaccgcgaagcttcgtccctttttgagggacgggctttttttgttgaaaaaaataaggaggaattgcaatgtcattgaaggaacaattagaaaacttacagcaaaagagtctgcaagaaattcaaagagttgttgatttagaggcgttaaatcaaattcgagtggaagtgctcggtaaaaaaggaccgattacagaagttttacgcggcatgcgtgatttaagtaatgaagaacgacctaaggtgggggcatttgctaatgaaatcaagagtgatttggcagaagcaatcgaaacccggaaggcagaattagaagccaagaaggcagcagcccaactggctcacgaaacattagatgttacattacctggccaaccggtcaaaaaagggaccccgcatgtcttaactcaagtgattgatgatttagaagatttatttattggaatgggttatcaagtcgttgctggctatgaagtggaagatgaaaaacataactttgaaatgttaaacatgccagctaatcatccagcccgtgatatgcaagatacgttctatattactaatgatttattgatgcgcacgcacatgtcacccaatgaagcacgtgacttggaaaaccatgactttgctaatggtcccattaagatgattagtcccggccgtgtttaccgccgtgatacagatgatgcaacgcattcgcatcaattctatcaaatggaaggccaagtgattgataaaaacattacaatggcagacttaaagggaaccttagaatacacgattcaccatatttttggtgaagaccgtgatttacgtttccggccaagttactttccattcacggaaccatctgttgaagtggatatttcttgtttccgttgtgatggtaaaggctgtaatgtctgcaagcaaactggctggattgaagttttaggggctgggatgacacatccgaacgtcttaaaagccggcggtgtcgactcagatgtctatggtggattcgcctttgggctcggggttgatcgctttgcaatgttgaaatatggtgtggatgatatccggaacttctacttaaatgacgttcgattcttaaatcaattcacacaggagggctagaccatgaaagtttcttacaactggttaaaagattatttagatttaacaactgccccagaggcattggctgaaaaaattacccgaacagggattgaagtggctgatgtcgcgcaaaagagcgcgggcttgaaaaaaattgtggtgggacatattttaagttgtgaaccccatccggattctgatcacttgaatgtttgccaagtggatgttggtgaagatgaacccttccaaattgtttgtggtgcacccaatgtcgctgctggccaatatgtagtcgttgcattacctaattctcggattgctgacaacgttaagattaaaaaaggcaagatgcgcggcgtggtttcaatggggatgatttgtggcttacaagaaattggctttgccgatagcgttgtgcctaaggaatatgttgatggcatctttgtcttcccagaagcaattgaacctgggacagaagtttatgaagctcttgggatgactgattacattatcgatcttgacctcaccgctaaccgagccgatacgcttggcatccacggtgtggcccatgaagtggccgccattgaatcattgacacctcattttgaagatatcgtagtgactgaaagcaacgttcaaacagctgatcaattgactgctcaagttgctgatgaacaattagcaccaagttatcacttgcgtatgttgcaaaacgtgaccgtccaaccaagtccaatgtggctacagacgcgtttatggaatgctggcattcgccccattaataaccttgttgatgtgacgaactacatgatgttaacgtatgggcaacctttacacgcgtttgatgcggatgctctaacgggtgatcacaaacaaatcgaagttcgtttagccaagacgggcgaaaaattaacgacccttgatgaaggcaaacatgacttaacaaatgaagatatcgtcattacagatggtcatcgaccaattgcgctagcaggggtcatgggtggtttgaactcacaaattactgctgatacgaaaaatgtgattatcgaagccgcagtttttgcaccaactgcagttcgtaaaacggctcaacgccataacttgcgttcagatgcgtcatcacggtttgaaaaaggcgtgaatgttgctgatgttcaaacagccttagatgctgctgctatgatgatggcagaccttggtaatgggcaagtgactgctggtacagttagcccaactaacttagtgccaactgacaaagtgattgaaatcgaagctgaccggattaatcgcgtcttaggcacagagattgcaacgcaaacaattgttgaattattagaacgatttggttttagtgtggtcaatactgataatcatttaacagtaacgattccaccacggcgttgggatattgaaatccaagcggatatcattgaagaagtcgctcgtttatacggttacgataacttaccaagcacattgccaactggcgatatgacaaccggggcattaacgactgaacaaaaggcactccgtaaaacccggcatacacttgaaggtgctggtttaacgcaagcaattagttatgcattaacgacccctgaaaaagcgcgtcaatttacgcttgttgattcggcgctgacagcacttgattggccaatgacgcaagatcatgcgcacttacgcatgaacttgattactggtttattggacgatgctgcttacaatgtggcacgtaaacaaactgatcttgcactatacgaacaaggacgggtatttttaaaacaagcagacgaccaagttcggccaacagaaattgaatatgtggctggcttaatgagtggcaatcgccaaatgaagacttggcaagctgccgcagcaccagttgatttctacacaatcaaaggtgtggttgaaatgttgatggcaagttacaacttagcggatgcaatcagttatcaaccaacacaagcttatccagaaatgcatcctggccgaacggcagccatttacgttggtgaacaactggttggatttgttggtcaaattcatccagcagttgcgaaagctaatcatttaaaagaaacttatgttttccaattagatttagcacaaatcctagccttgccaacccaaacagtgattgctaaaccagcacctaaattccctgaagtaacgcgggatattgcaattcaggtgtctgatcaagtttcaaatgccgcaattgttgaagccatcaaagcaaagggtggcgcccacttagtttcagttgaacttttcgatgtttacgcagggagtcatattgaggctggtgagaagtcaatggcttacaccttaacgtacctcaatgaggcagctactttaacagaagaagaagttaacgctgcttttgaaaaagtagtcgctgaattagttgctacttttgatgccaaaatccgttaatctcgaatctttaatgcaatttttgaataatttggtataatgttttaaggattgtatttaaaagagcaattaggaggtcatcctttgaagaaagttgatcaaaaggagccagtaaatcaagaaaaagcggcacaatcattgtacgaagaacgccgtgcagaaaaaaaagcagcaaataaaattgtctattggattatcggtattctattagcgcttgttgtcattattggattcatgggatatcgctacgtacaagcatctcttaaaccatacgacaccaaagcaaaacaagaaattaccgtgcgcattcccaacggctcaacgaataaacaaatcgctgctattttgcaggataaaaaattaattcgaagcgcgccagtctttaattattatgtgaagactcataatttctcggatttccaagccggttatcatgtgttgaaacaatcaatggggttagataagatcatctctaacttacaaaaagaaggcacaccaacccgtcctcgcgatgtgaagggcaaattgttagttaaagaaggggtcactttagaagaaattgcggccgaagttggtaaacaaacaaaattctctaaagcagccttcatcaaacaagcgaatgataagcaattcttagcaagtttagagaagaaataccctgcattattgtcatcaacaatggctcaaaaggatgtccgctatcacttagaagggtaccttttcccagccacttacgaagtttataaagatagtacattaaaagaaattatcaccgaaatggtttcaacgatggatcaaaagatgcaaccttattatgcaaccattaaggataagaagttaaccgttcaacaaacgttaacgctagcttcattggttgaacgtgaaggggtcacagccgtcgatcgccaaaagattgccggtgtcttctttaaccgtttagacatcgatatgccaattcaatctgatatttcagtaatgtatgcattaaatacccacaagacacacctttataacaaagatactaaagtcgattcaccatataacttatatatcaataaaggttatggcccaggaccgtttaactcacctagtttacagtctgtcacagccgtcttgaatccagctgatcgtgatcaaaattatctctactttgttgctaacttgaagacaggtaaagtatattactcaagaaccttcgaacaacataacgatacaacagattcgattgaagattaggttcatttaggattatcgaagtcgaccgccattggaggtcgacttctgtttgcccaaaaagaagttgagaataaaaggagcgtcccatgtccagtcaaaaaaaagcacccatcattatcggcgttacaggcgggtccggtagcgggaaaacaaccgttagccaggctatcgcccaaaaatttgcgaatcactcagtgatgttattaccacaagatgcgtattacaaacggcaagatgttccgtttgaacaacgccaacaaacgaattatgatcatccagatgcttttgacaacgatttattaatcgaacaagcatcaatgttaaaaaatcatcaagccattgaacaaccggtctatgattataaaattcataatcggacggaggaaattcaacgggttgaaccgcaagatgttattatcttggaggggattcttgtattggctgatgcccggttacgggatttgatggatattaaggtttatgtggatactgatgatgatattcggttattaagacggatgcatcgcgatatggaaagccgtggtcgaacgtttgatgatgtggttggccaatatcttaagacggtaaaacccatgttccatgaattcattgaaccaaccaagcgttacgctgatttaattgtcccagaaggtggcaataatcgcgtggccattgatttacttgtaacaaagattcaatcaatcctaaatgccgattaaagattgagatttgacaaggacgtacacagtaattaagatagtcagtattattaattaaaataaagaggtggataaaatggtacaaaaaacttatccaatgactgcagaaggcaaagaaaagttagccgaagaactagaaacactcaaaatggtaaaacgaccagaagtcattgaccggattaaaattgcacggagctttggtgatttatcagaaaactctgaatatgaatcagctaaagatgaacaaagctcattggaaacacgcatcgcagaagttgagaatatgttacgctttgcagaagtaatcgatgttgatagcatcgcagctgatgaaattgctgttggtaaaacagttagctttacagacgacgaagatggtgaagaagaaacttaccaaatcgttggtgctgcagaatcagaccccttcagtggtaaaatttcaaatgattcaccaattgcccaagcattacttggcaaacacgttggtgataaagtagctgtgcaaacaccaggcggcgacatgcacgtcacaattacagaagttaaataaagtgcgtttcgaacgggttagtctttgaggattaacgtaaaaacgggtgttatggtcgaattttgaccatgacgcccgttttgtagttaaccggaaaaggttgttcgaaaaagcacgtttaagaatagagtgcttttgggtgcggttagcaactgagcattaatacaaaattggcagtcatccagattttaggatgactgccaattttagattaagcagaagttgttgcagccaaaaagcacgtttcaaaaaagccacggaaatcaatcccgtggcttttttattttgccgttaattcgttaatcagccttgagacggattggtgtttatctggtttgcttgtataataatattaatcagttgaaaggggaccgtaaatatgccgtttatctggcgcgtttttttaataatagaagcgattatcttcgggacgttcatttggcagatgattacgatacccgcaaatttagtgttcatcattgcaggtattttactcttagtctgggccaacaaacgtcgtagtaaaggtaaaatcggtgtctggacgactttgttaacgatggtcggttgcgtagctgttacggtaccactgttaattaatttctcgttatggttaatgattattgttgcggtcgtctttttagccttaaatcatagccgaatgggacagtttagcagccgcaatatgaatcagttgtttgataatgccccttggcgcaagaaaaaatttattcccgttaatacgacggaacccaccgcgaaaaagacaacagtcaagcggcatagttggtttggtcatcagacaattggcaataacatttttgaatgggatgatattaacttcgcggtcgctgccggtgatacaattatcgatttagggagcaccattttacccaagaatgacaaccatattgtcatccgtaaggggtttggaaagacacggattttagtgcctgtcgggaccggtgtctatcttgatcactctgcaatgttagggagtgtgacaatcgacaatcagcactataatttgaaaaatgagtcgattcagttgtatagtacaaactatgatgaagaaagtcgccaccttaaaatcattaccaacgtaatgattggtgatcttgaggtgatcttagtatgagcaagttaacgcggagctttatatggatcagcacgagtttgttgacgcttctgttttcagtggcgttattttttgcgtatttctacagtacgcatcaggaacaatggctgattagtttggccacgaagcaattattctatgtaccactgattgtttatattgtggtggccgcaatggcagtaggctttttagttaccgcaatcgtctatcttgtcgtacgtaagcaattatcccatactgaaagccagttacaatttttactttctggacagtatgaatcgcctgtttttcagattagacagagcgaaaccaatgactacgcgatgtcaatcgagcaaacagttgaacaattacgccaaaaaatgatacgcttacaacaagagattcaaagttatagtgatcggccgaccgtgattgctggtgaaaccaaggaagaaattctagcgcaagaacggcatcgtttagcacgcgagttacatgattcagtgagtcagcaactatttgcggcgacgatgatgttgtcggcactcagtgaagttgcgcaaaaacaagctgataacgcgcagatgttgcagtccttaacgacagttgaacgggtgttaaatgaggctcaatcagaaatgcgggccttactcttgcatctacgaccagttaatttggaaggcaagagtttacgcgatgggatcattcagttattgaacgaattgaagaccaaaattgcgattcagattacatgggacattgatagcataacgttaccaagtggcatcgaagataatttatttagaattgtccaagagttgctgtcaaacacactacggcatgcgaaggcccaagagattgaagtatacttgaaacaactcggtcagagtgttttactaaaggtaattgatgacgggaccgggtttgatacgaatgctgagcaaaaagccggcagttatgggttaaacaacattgtcgaacgggcccatagtgttggagggacggcaaaaattattagtttgcctaaccagggaacgagtgttgaaattcgagtgccactattaaaggagaccaattaagtgattaatgtattgatagtagacgaccatgaaatggtgcgattaggcatctcaacgtatttaggggttcaagacgatattcatgtcgtcgatcaagccgtcaatggtaaagaaggtgtcgaaaaggcgcttgcattacgtcctgatgcgattttaatggacttagtgatgcctgagatggatggcattgaggccaccaaaacgattttaaaggcgtggcctgaagccaaaatcattatcttaacgagttttatcgatgatgagaaagtttatccggcgattgaagccggtgcggccagttacatattaaaaacttctacagccgaggaaattgccaatacgattcgtaaaacggcgcaaggacaatcggttttagagccagaagtgacgaataagatgatgaatcgcttaacacatccggctgaacctaagctatatgaagacttaactaatcgcgaacgtgaagtcttaggcttgattgccaaaggccgtagtaatcaagagattgcggatgaattattcattacgttaaaaacggtcaagacgcacgtttcaaatattttggcgaagttacaagtggatgatcgcacccaagcggcaatttatgcgattaagaaccaactagtcgattaatcaggaggagttcaacatgcaaattcaggtgtcagatgcagcaagtcaatggtttcgcgacgaattagccttacaatcgggggatgcagtccgcttttttggcaaagtgtatggtcaaacggccgtgcatgatggcttttcattgggcatggaacgcgctactgttgagcagccaattggttcggttgttaaagatggtatcacctattttgcgagtcaatcggacgaatggttttttgccgattatgatttacaggttgattacgatccagagcttgaagaacctaagtatcaatttgaacgtcgttagacgataaaaagccccgccaaatcatttagcggggctttttattttgggttaaaaggcgaccagtacgcgcccagttttatgcgtcttttggctaagttctcgggctaaatcagaaaaggcgaccaagttaactgttggccaaatttccggtttaaacgtcgtggcgagtaattgccagagttctttacggtctctgcgcgggtaatagactgaatcaattccggctaaggtaatcccacgtagaataaacggcatcaccgttgtttctagggttgcaccagcggcattgccacaagttgctacgaatccgccggcacaaacttgcggtaagatgtgggctaaaacaggaccgccaagcgtatcaataaccccggtgaatgtctgatggctgagcgctttaagcggaccagcagttaggtcagctgtattaataacatgggtcgcaccaaggtgcaataaataatcggtttgttgcaagtcacgcgtagttgcggttagatttgtgaagccaagctgcgcgaggatggtaagtgcgaaacttccgactccgccagtggcacccgtaattaagagtggggtgtcatgatcggctgtaaaggcttggcgtaataatttgctgagcgcaattgcggcggtgaaaccggccgtcccaaactgcatcgtttcagcaagactaagattttcgggcaacttaaagagccattcactagggactttgacatattcagcgtagcccccagcgattgtaatgccagtttcataacccgtacataacacctgatcgcccgcttcaaagaacggattatccgattcgacaacttcgccagcaaaatcaacgccaggtgtcatggggtagtgacgtaagacgccacttttaggattcatagcgagccggtctttgtagttaatatcagaataggcgactttgactaacaccccgtctttagcgaggtctggcgttaacttagtttgataagtggcactgacagtagtatcggtttgttctaaaacgagtgcttgataggcgaccatatgattacaacctcatttctaaataattatttaacttcattatacaacaatgttcgctttgaattggcattgcgtctcggaaacggtataattaataggatattagtcaactaataacgagtctgagagtgctaaagataaaggggacgaagaagaagatgcaacaaccaatggtggaatttaaaaatgtcattaaagaatacgacgatgtccaaattttaaagggcatcgacattgcgttggaaaaaggtaagttttataccttacttgggccgtctggctgtggtaagacaactattttaagaattatcgccggatttaccaatgcgtctgccggggatgttttatttgaagggcagaagatgaacgatttaccggccaataagcgccaagtcaatacggtttttcaagattatgccttgtttccccatctaaatgtctttgagaatgttgcatttgggttaaatctacgtaaagttaaaaaagcagcgattaaagaaaaagtgattgaagcccttaaattggtgcgccttgccggatatgagaatcgcgaaattagtgagttatcaggtgggcaacaacaacgagtagcgattgcgcgcgctttggccaatgaaccaaaagtcttgctactagatgaacctctatcagcactcgatatgaaattacgaaaagatatgcaatatgaactacgcgatttacaacaacgattagggattacgttcttatttgtaacgcatgatcaagaagaagccttagcgatgagtgatgaaatttttgttatgaacgaagggcgcgtgttgcaaagtgggacacctgtcgacatttatgacgaaccgatcaaccatttcgtagccgattttatcggggaaagtaacattctgccaggtaaaatggttgctgattatcaagttgaaatggtcggcaagcagttcgaatgtgccgatgccgggatgcgggtcaacgaagcagttgaagtggtgcttcgtcctgaagatctagacattgttgccgttgaccaaggccaattagtggtaacggttgatacgcagctatttcgtggtgactattatgaaattacggcctatgatgcggatcaaaaccggtggttgattcattcaactaacccagctaaagatggtcaacgagtcggcttattctttgaaccagaagacgtgcacatcatgcgttttggggaatcagaagaagatttcgatgcacgacttgaaagttacgaagaggaggactaaggcaattgcgtaaaaaacaatggttatattacttaccatatgccctctggctaattttgttcgtcctcgcaccagtcgcattgattgtgtaccagtccttctttgatatcaatgggcatgcgacattggtcaactacacgacctatttccagtcaggcacttacttgaagatgacattaaattcgttatggtacgcctttttaattacgctgattacgctattaatcagttatccgacggcgtattggcttcatcaaacgaaacataaacaactttggctattattaattattttaccgacatggattaacttattactgaaagcttatgcgtttatcgggatttttagtcaagatggtgccattaatcattttttggggtggttcgggattgggccacaacagattttatttacgaatttcagtttcttagtggtggcgacctatattgaaattccgtttatgattttgccgatatttaatagtttagaagaattgaatccatcattggtcaatgcaagtcgtgatcttggcgcaagtaattggcaaacctttacgaaagtcatcttaccgttaacaatggctggggttaaagccgggatacaggccatctttattccatcgttatccttattcatgttgacgcgtctaatcgggggtaaccgcgtgattacgctggggactgcgattgaagaacacttcctcacaacaatgaactggggaatgggctcgaccatcggggtggtcttaatcgtcgccatgggcttaatcatgctggtaaccggggagcaaaaagcaaagaagaaggtgactaacaaatgaaaaaaatgaaatggcaaaacgtttggttagtgcttgtctctgtcttattgtacgcaccgattttctatttgattttctattcatttagcagtggggataatatgaatggcttcaaggcatttacctgggcaaattatcaggccttgtttgaagatactcggatgattgaaattgtgttacaaacgttattaatcgcgattctatcatctttatgtgcgacgattgtggggacgtttggggcgttagggatttattcaacgaagcaacggcgtgtgcgcaatatgattttatcgctgaacaatattttaatggtttcacccgatgtcattatcggggcaagttttttaattttcttcacgttcttaggttttggtttgggctttggttcagttttactgagccatatcgctttttcaattccgattgttgtcttgatggttttgccgaagttaaatgaaatgcggccagcattagttgatgcggcacgtgatttaggtgcgactgactggcaagtcctgagtaaagttattttaccgtacattagttccggcatttttgcaggctttttcatggcgttcacctattcgctagatgattttgccgtgaccttctttgtcactgggaacgggtttgaaacgctctccgttgaaatttactccagagcgcgtcaaggaattagtctagaaatcaacgcattatctgccttgatgtttgtcttctccttaatccttgtggccggctactatttattgaatcaaagaagccaagcccaaaaagcacggcgtaaacggaaagcgggggcttaaaatgaataaattaggacgcatcactttagcgattttagtggtctgtgcagccctttggtttgggacggttgaattacaaaaatcacaaggttatacgaaaaataatacattaacattatataactggggcgattatatcgacccagcacttattaaaaagtttgaaaagcaaactggttatcatgtttcggttgagacgtttgatagcaacgaagcgatgtacacgaagattaagcagggtgggactgcttacgatttagcggtgccaagtgagtacatgattgaaaagatgcgcaaagcacacttacttaaaccgattgatcatcgtcgcttaaccggctatcaaaatattggcaaggattttttgaatcaatcatttgatcctgggaataagtattcattgccttatttctggggcacactcgggattatctacaacgatcaattggttaaaaaaccactgacacattggtcagatctatggtcaccagattatcgcggccaaattatggtagtcgatagtgctcgggatatgatggccgtgggcttgatcgaaaatggccagtcagtcaatagcacgaatccggcggttttaaaggcggctaaggacaagcttgatcagatggcaccaaatgtcaaagcgattgtagctgacgaaattaagatgtatatggttcaaaatgaagcgagtgttgctgtgacttggtccggtgaagctgccgagatgttggataataatccccatttgcactatgtaattccagaagagggcagcaatctatggtttgataatctagtgattcccaagacggcaaaacatgaaaaggcggcctatgccttcttaaactttatgttagagcccaaaaacgcggctcaaaatgctgaatatattggttattcaacgcccaatataccggccaaagcactcttgccagcagcaacacggaataacccaggctattatccaagtcaaaaggtgatcgatcgcttgcgagtttatagtgatttatcaccaactgcggttggccgttataatgatttatttttagagtttaaaatgcaacattaaaagtacaatgagcagattgaaatggttcatggtataatagatacagaatttttttggatggaggttacctatgtcatttgaatggtcacagttattaacgtggcggatgctcgcaaatgtgctagacatcatcgttgtctggtattttgtgtataaattaatcatgttgattcgcggtaccaaagccgtccaattgtttaaaggtattatagtcattgcgctgattaaggttatcagttggtacattggtctacgaactgtttcgtacattatggatcaatttatcagctggattgtgattgcgttgatcgttatttttcaacccgaaattagacgtggtttggaacatatcggacgtggatcgctactacgacgcggcgttaatcccaagattgaacaagaaaataatttaattaaagccctcgataagtcgattcagtatatgtcgaaacggcgtatcggggcgctgattacaattcaaatgaataccggtttggaagattatatcgaaactgggattgatttggatgcggatgtgacgggggagttattaattaacatctttatcccgaatacaccattgcatgatggggcggtcataattcgcgatgataagattgccgttgcggccgcttacctaccactttcagagagtaatttaattcccaaagaattagggaccagacatcgggcagccgttgggattagtgaagtaacggatgctttgacgattgttgtttctgaagaaaccggtggtgtcacattaacgcgcaataacgagttaatgcgtgatttaagccgtgatgattatatgaagtacttcaactcgcatttgattacccaagaggaaaacaaaacgagtctcttacaagaatttgttgatggcttcaaaaaaggaggccagaaatgatgaaaaagtttgttgaaggcccatggctctatcgaattttagcgttatttctagcgttgttactgtttggttatgtcaatttggatgaaattaacacgacgcgccagacgaataacaatgatacacagatgctagcaacccgcacggaaaccgtaaaagtgccgctccagattaatgcagatactggtcggtatttcattaccggctatccacaaaaggtcaaagtgaaattatccgggccgaatgcgctagtcacatcagcagttaacacattaaatttccgcgtgattggcgatttaacgaagctgggtcctggtgatcacaccgtcaagttaaaacagacggggattaataaagatatcaaagtcacgattgaacctaaagaaattaaggtccacattgagcacaaagtgacaaagcaattccctgtgcaggtcaatgttaagaaagaaaacttagcggccgggtatagtctaggaaatccaaaactaagtcaagacgtggttgaagtcagtggtgcaaaatcagcagtgaatgctgtgtcgcaagtagtagccactgttgatcccgatgaaggcaccaaaaaagacatcaatgaagaagtcttgttgcaagctgttgatcgcaatgggaaagcgttaaatgttttaatttcaccacaaaccgttaacgttaagatattggttcaaatgagtaagaaaacactcccgattagtttggaaaagaccggtgaaaaaagtggctacagctacagtctgtcatcaacaactgattcagtgaccgtgtatggtcgtcaaacagctttagccaagttgacgtcgttaccagtgagtgtcgatttatcgtcaatcacgagttcaacttcaaagacggttaaagtggctttaccagacaacatttatgagagtacgccaagtgccattaaggtgacaattacggtgactccagatacgaccaatacgagtgctactaatactgttgaagcgccgtctgaaagtacggcacaaacatcaagtagtgcgctcgttgagtcaagttcaagtaacagccaatcaagtagtcaatcaagctcaagtgaaagtagtaaagcaaataccgatgtaaatcaataatcaacgctaaagattttagcaggatgaatggagataattaaatatgacaaagtattttggaactgatggtgtccgtggcgttgccaacttagaattaagcccagaaatggcttttaaattaggacgtgcgggtggttacgttttgaccaagcacgctgataaggatcaacggccaaaggttttggtggctcgtgacacacgtatttcaggccaaatgttagaacaatctttgatttccggcttattatcagttgggattgaagtcttatcattaggcgtggtgacaacacctgcggttgcctatttaattaaggttcaagaagcaagtgccggcattatgatttcagcctcacataaccccgctatctataatgggattaaattcttcggcgcagatggttacaaattaccagacgcaactgaagaagaaattgaagcaattattgatgccgaagaagatactttaccacgtccagaaggcgctggtctggggacggtggaagaatatccagaaggtgctttgaagtatacccaattcttagaacacacgattcctgatgatttagctgggattaaagtggcattggatggcgcaaacggttcaaccagtggtttaattagccgcgtatttgctgatctagaaacagaatttacaacaacggcaacccatccagatggtttgaatatcaacgatggtgtcggttcaacacacccagaaaatgttgctaaaagagtgcttgaaacaggcgcacaagttggactagcatttgatggtgacggggatcggtgtatcgcagttgacgaattaggtaatattattgatggggacaagattatgttcattctcggtcaatatttatctgataagggtcgtttaaaacaagatacgattgtcacaactgttatgagtaatatcggcttgtataaagcgattgaagccaacaacatgcaatcagtccaaacagacgttggggatcgtcacgtcgttgaagaaatgcgtgaaaaaggctataaccttggtggcgaacaatcaggacacatcatcatctttgattaccacaatacaggtgatgggatgttaaccgggattcaactcttaaacgtcatgaaacaaactggtaagaagttatctgaattagcagcccctgttcaaacttacccacaaaaactcgttaacttaacagttaaggacaaggatgcttggttaacaaatgacaagatccaagctgccattgataccgttgaaaaagaaatgaatggtgatggccgcgtcttggttcgtccaagtgggacagaaccattgctacgagtaatgtgtgaagctgcaacagaagaaaaagtaaatcaatatgctgatcaaatcgcagcggttgttaaagctgaaattggtgcataattaaagggagtgctgacgcgagttggttaggctttgaggattaacagtaaaatgggggttatggtgtttcttgccataatccccattttgcagttcaccggaaatgactactcgagaagcgcgttcaagttggtcaacttttgagcactagcttgaaaagcacgttctcacttgaatcaaactaaaaaagcccgtcaacattgtgttgacgggtttttttggtgcaattttatttaagagcccattcttctaacgcaatgtgacttgttcgtacatcagaaaaccaaagacaaccaataagacaacagcagcggatatcagataccattctttgacaagtatgataggtgcatcagtcaaatgataatttttgcggtaacgtttgagattgaaaacactgacttcattcacgatgattaataaagcgggttctaatagtagcatgtatttactaccggttgaatcgacaatgttattggcggcaatatgtaaggcgattgttttaggtgcaacgacgataaagctcagtccgactaataggccaagaagagaaatacttcgaattaacaagatgctctttttcattacagaaactccttttctaaaattgactggtcttagtatagcataaaagcgctagatagcggaaaatatttggactataccaaaattataaatttatatataccaataaaaatgttgacattaaaatcgttggtgctattatatttaagtgttgtaccaattgattaaagaatattaaaccaaagttgaaaagaggatttttataatgtgtggaatcgtaggcgtaattggcaatgaaaagacaactgaaattttattaaacggattagagaagttggcgtatcgtggttacgattcagcgggcatttacgtgaacagcgaaactgggcaggactacttagttaaagaacccggtaaaattagcgttctagaagcagcggttgggcctgaagtacaaggaacaatcggtgttggtcatacgcgttgggcaacgcatggtgttgcgagtcgtgataatgcgcatccgcatgtttctgaagatggtcgtttttacttggttcacaacggcgtgttaactaactatttagctttaaaagaaacatacttggaggatgtccattttgtcagtcaaaccgatacggaagtcgctgttcagttgattgcttaccttgctaagacagaacaattatcagctaaggaagccttccggaaggctttaacgttgattgaaggctcatacgcatttgtcatggtcgatcgtgatgatcctgacaccttatacgttgctaagaataaatcgccattgttaatcggtgtaggtgatggctttaacgttgtgtgctcggatgcattagcgatgttgaatgaaacaaaagattttattgaaatccatgatcgtgaaatggtgacactcacgaaacaaagtgttcaaattgaagatttagacggcacttttattcaccgcgaaagctatcatgttgaaatggatgctgatgcagtgggcaagggcacatacccacactacatgttaaaagaaatcgacgaacaaccagctgttatgcggcgtttattgaacgaatacgttgctgttgatggagagcttaaaatcgactcagcgttactcagtgcaatgaatgatgcagatcgcctctacatcgtggcggctgggacaagttatcatgccggtttaatcgggaagaccttgtttgaaacattaacgcacaagcctgtcgaagtacatgttgctagtgaattcggctatcacatgccgctattatctgaaaagccattctttatctttttaacacaaagtggcgaaactgctgatagtcgccaagtgttggtacaaactaatgccttgcattatccaagcttgaccatcactaacagccaagggtcaacactttcacgggaagctgattacacattattattgcatgcaggcccagaaattgcggttgcttcaacgaaagcctacactgcacaaattgcagttgaattattcttggctgttgcgcttggacgccacaatcaactggtgctagcagaacaattcgatgtacatcatgaattaggcttagtcgctactggcatggaagctttattgagcgaaaaagaacagattgaaaccttgacgactgattacttacaaacaacacgcaataccttttatattggtcgtggtgaagattacgccttgagtttagaagctgctttgaagttaaaagaaatttcatacatccaagctgaaggatttgcagccggcgaattaaaacatggcaccatcgctttgattgaagaggggacacccgttattgcattcttgatggatgccaaaacgattgcgcacacgcgtggtaacttacaagaagtgactgcgcgtggggcaaaagccttgacgattgtcagcgaagaatctgctgaagcagatgatcagatcattttaccaaccgtaaacgacttattgacaccattattggggatcattcctggtcaattaattgcttactatgcaagtttgcatagagggtatgatgtagatcagccaagaaacctagctaagagtgtcacggttgaataaataatattcaaaaagcctcgttcaaagaacgaggctttttttgcgtttaatgagttggtgcatatgttgctcgaggaccgccaacgtattttggtcgtgaccgtaaagctgtgacatgtgcactacccaatgtatcaagggttgggcggacagggacttgaacgaatttcacgtgcatcccaatcgccgtatcaccgatatctaatccagcttgtgcaacgatatgttcaacttcaaccggatcactgaattgttcaaatgcagcgacggagcaggcgcctccagcgtgcatagcaggaacaactgagacaatttcaaagtcgtgtgcgcgggcaacctgacgttcaatcaccaaactacggttaatatgttcacagccttgcacggctaaatgaatccccaatggattgagaatgccacgaagtgttgcgatgatgacttcaccgacttctttgctagaagccttaccgatatgaccaccgacgacttcactcgttgaacacccgaggacgaacaaatcaccatttcctaagtgtgcttcgtttagaacatcctgagtcatctttgttaagtcttgttgaatttggtttaattgtaattcgtttgtcatttaaaaaatctcctagtggttaaataattgtggtcgaatacgggataaactagtgactaacgggatggtaaccacgataccaagtccattttgaacaatattactgaaaatcgaagcgattccggcagcccagccgaaaagtaaactggtagctaaaaagtaaccggcaaccatgacgatactaccgcaaatgagggggataatcagctgctttggtcgcattgaatcattacgagtcaggtgacctacaacgaagccttgccccccatgaatgatgagtgagaagagacaccactcagggtaaccagataatagatcgattaataggccactcagggctccgacagtgagtccgccaggatttcgcagcatgatcgccgttgtataaataccgacctcacagagcgtcacaaagcccttcgtcgccggaatcgggatgatgattaacaaagagagtgccacggtcaatgcggtgagcatcgcgagtaatggtaattgacgtttattaaagtgcatgtttagtagccccctgccagacattccccaggccatggcgtagatgaataccatcttttaaaccggcataaacaaatttctttgcgcgtgccacggcaacttcaatcgattttccttgtgctaattccgccgcaatcgctgccgaaagcgtacaaccggcgccatcaatggtagttgtttccaatcgtggagcttctaaataatgagttgttgcgcccgattttaataaatcaacggcctgctcaccagggaatcgttgaccacctttgataatgacgtgcttggggccaaatgattggataattgtagcagcttcgaccatttcctcacgcgtggtaattgacgaaagaccactgagttgttgggcttccaacaagtttggggtgacaacgctcgtcaaaggcagtagttctttttttaacgtgtcgaggtacgcttgctgcgcaagaatggcgccttctttaaagacgaggaccgggtcagcgatgatggttaattcaggatgctgtcgtagtcgctcacagatggcttttaaagtttccgtttgatgaaccaaaccaattttaacgtgcgttagtggcacgtagtttaaaatggcatcaagctggtccaaaatggtatcctcaggtaagttgtggattttcaagtgaccgtctggtagcaatgtagcgatgcaagttaaggcactgaccccaaacgtttctaaggcttcgaacgtttttaaatcggcctggatgccaccaccacccagagtatcagagccggcaatggttagaatgttttgcatagttgtcctccaaaattctattcttgactatcatagagaagaatagaatgttcaacaacagccaattggcttgtttttttaccatccaatttgtaaactaaataagaggtgttaaaaatgattgaatggttacaatatttacctgaacaaaagccaaagtatatggcaattaaaaaaatgattattagcttgatagataaaggacaattaagttcaggtgaccaattaccgccagagcgtcagttagctaaattattgagtgtcaatcgttcaacggtgacacgtgcgtctgatgaattggttgcagatggcgtgattgaacgtcgcgttggtagcgggacgtttgtcagccagcaagcgcgaccacaggcaaggcgggtcaattggcatacttatttgatcagccaacgtcagtcacaaagtcaaaatgaacggcgccaattacaacaactgattagacgaaaacctgaaaagttaattgatgtttattcaagtgacttaccattagaattagtcccacaatttcaatttcctgcattgacgtggcaagattttattactgcacaagcattagagacaccacgaggctatcaaccacttattacggcaattaatcaattggatcaacacaataaacggctattttttaccgaagagcagttattaatgactgccggtgtgcaacaatcactctttttaatattacagggtttattgacgccaggtgatgctgttgcaattgaatcaccctccttttttcatgactcaactttgtttgaagcgacgggtgtccgtgtctatgaagcttcagttgatgctgatgggatttatttgactgatttagaagagctaatcattaagcaccgtgttaagttggttattctcaatccagattatcaaaatccaacggggcacgtaatgagttttcaaaaaagaaaagcagttgttcatttatgccagatgcatcaaataccaatcgtagaagatgatgtctttggttggttaggatttgatacaactaggccaatcccaacgttaaagcaacttgatccggataatgttatttatattagttcgttgtccaaaattatgggggctagtagccgaatcgggtgggtagctgctactccgcaagtcatcgaacagttgacccgcgtgcaacatgaaatggatttagtgccaagcattatggcgcaagtcatggtgaccttagcgatgggggatccgcaatttcaaacgcagttggatcaacttaaggggacgcttcaagaacgtgcacaagcaacctataagatgcttgaaagggtattacccgattggcacgtttacttaccagcgggaggttattatatttgggtgacccatccgaaccataaattacgcttaaaaacctttattgatcatcagcttgctgtcgcaccaggatcattatttgggcttaaaacagatgcgttgcgcatcaattttgcgcgattaaatgcaattgatttggtcgcgctagaacaacgattagtagccattattaaagcaacagaataaagagggggattcggatgacagagcaattcgtaccagagatttatacaccattaaaaaccagtgttgtcggaccacctgctgtggcgcgacaagttggggggattaagatcctcggtaagaagattaaaacaattatttttaccaccgatgttgcgattgtgaataatacaaatgctgacgctgttttggcagtttatccatttacaccacacccagctgtcatgaatgccatcagcaatgtggcgacgatccccgtttttaatgggattggtgggggcttaacggccggcagccggtccgcgtacatgggattattggcagaggccgccggttcgattggcgtggtggttaacgcaccgacctcggtggagacgattaaaatgattaaccgcgttgttgacgttccgattatttgtactgttgtgtcagaacgacaggattatgccgcgcagattgaagctggagtttcaattttaaacgttagtggcgcggctaaaaccccagcaattgttagtgcaattcgccaacaatatcccgaaattccgattatggcaactgggggtaaaaacgaagctagtatattagcgacgattgaagcgggtgcgaatgcattgacgtacacgccaccgaccaatggtgagttatttgctaagaaaatggccgattaccgatctgatttagtatgataacagttgacgtgctatgcaatcccccgtatgataaaaagattactagaggaggtttttgaatgattcgtcaagcaacagttgcagatgacaagagtgtcttgccaattattaatgttgtttttgaagaaatggaaatgccactcttccaaaagattccgctagaggatttgtttagcattttagaacaggcctttgcaatgcctgaatatcggtatagttatgctaacacactagtttatgaagaggatggtcagattttgggcatacttgttagctttcctgaggaaaaagaggctcatattgatgatgcccttgcaccgttgtttccacaaattggcttacctgaaacaacgcgtttctttaatgataaggaggcacagccaggtgaatggcatattgatacaattgccgttgttccacaagcacgtggtaagggtgtcggatctaagctattggcagcatgtgaatcagttgccaaggctaatcacaaacagattattagtttaaatgtagattttaataatccaggtgccaaaaaattatacgaaaaaatgggttatcaagtcgttggggaattgatgattggtaatcatcaatatgaacatatgatccgtaaaataggctaatccaataccgtggtataatgggagtagtgatcaactattttggagaggtcgtaggatagtatggataggcgaaaaggcttattggctgaactcaatcaatatgtctatagagcgattataagtgcagtggggatgtcgatttatgttttagcggattctttcttcgtcgctaaaggaattggtgttctgggggtcaccgttatgaacttaacgatgccgctttttaacttgatggaaggtttaggattactacttggaatgggtggcgcgacaatttttaccatctataaaattagcaatccaaagattgccaatcgtgtctttacgcaaatgttttatattgggctattattgggcgcttttttctcgatgtgcggactactttttgcgtcgaaaataactgggatattgggagcagatggagagacttggcaacatacattaagttatgtcagaatcatactaatttgtggtcctttttttgtatttaataatttaatattatcgttcgttcggaatgatcgggggaccatgatagccatggtagcgatgattatctctagcttgactaatattttactcgattggctattaatacttgttttaaaattaggaatggtcggtgcgggactagcaacaagtttatctccaatgattagtattttgattattcttagtcacttttttaggcaagataatcatttaacaatcggctggtatggatttgattttaaaattattagtagtgcaattcaaattggcttaccctcgtttttaacagagatgagcaatgggattggtatttttgtatttaacttggttatcttgcatattagtggcaatatgggtgttgcagcatacgggattgctactaatattttattagtggtgcttgccatttttacgggtgttgctcagggaatccaaccacttgtaagtcgctcctattcagagcatgcattaccaaaaattaagtttgtattgaaatatggcgtagcttgcgcattagtgattgggatagttgcatactttattgtcttccaatttggcgcgcagattattggcgtatttaatacggaaaataatgcgcaagtgattaaaattgccagtgacgggatgccaatctatttcttaagtatctttttctcggggataaacgtggttttgaatatattctttgcatcaattaataagacacgcatttcacttgcattagtttttgtacgtggctatctattagtagcagttgtattaacaatcagtgcgctttgcttcggaatgagcggtgtctgggcaagtttaccaataattgaactaatttcagtgggtcttgctattatgtcttatttccgagtggaaatagaattgaagaatggtattttcgagattggctgactgaatgaattaaaatagcatgaattattttagaaagcaactaatgaaaatagctggtttaaaatgaaaataaaaaaatataaaagtttaataaatgtataaaaataatatatttattaaactttttattttttctcctttttcttagagagttaatgtccggaatggcggctattagataaaaataatggtagtgtaagttattgacagtaagcattcattttaatatgtatacatcgcgaaaatagaaagcgctcacaaaacgcccttgcagtacttttacattagtgttaaaacataagtgttagttatttaacaaagtagagatttgggagggtacagacatgacaaaaatgaaaattgctgtttccgctgatttaaaccaatttttttcaacggatcggcaaaccgtattagttgagaataccgattttgtggatgtcgcagctgttgttttatcagatactgatttgcaatatgtaacaactgttgatgatacaaaatttgatatcccaatttttattgttactgataacagttcaacaatcggaaaggatgtaatggcaaaaattttccatatcattgatacgaaaaatgaatacgattacagacttgctaatagagaaattgaagctgctgctactaaatatgaagaaggtgttttaccacctttctttaaagaattaacagcatatgttgatcgtggcaacattcaatttgattgtccaggacatcaaggtggtcaatatttccgtaaacatccagccggaagacagttatacgacttctttggcgaaaatatttttagagcggacatttgtaatgcggatgttgatttgggtgacttattaatccatgaagggcccgcaatggatgcacaaaaacatgctgccaaagtatttaatgcagacaagacatattttgtaatgaacgggacaacaacttcaaataatattgcgatcacttctgcaattgcgcccggtgatttagtattatttgaccgaaataatcacaaatcaatctataatgcagccttagttaaagatggtgggcgtccagtttatcttgaaacatcacgtgatccttatggctttattggtggtatttacgctaaagatttcgatgaagactacattcgccaacaaatcgctaaagttgatcctgaaaaagctaaagctaaacgaccattccgtttagctgttattcaattaggaacttatgatggaacaatttataatgcaaaacaagttgttgaaaagattggtcatctttgtgactatatcctctttgactcagcttgggttggttatgaacaatttattccaatgatgcgtgattcatcaccattattactagacttaggacctgaagatccaggtatcttagtaacacaatcaacacataaacaacaagcgggattttcacaagcatcacaaattcataaaaaagattcacatatcaagggtcaaaagagatatatcaaccacaaacgcttcaataatgcttacatgcaatatgcgtcaacttcaccattctatccattgtttgcaacattggatgttaatgcgaagatgcaagatggcgaagctggtaagcgattatggcatgatgctttggttgtttccgttaacgcgcggaagagtttgttaaagaatgcatcgatgattaaacctttcttaccaccaatggtaaacggtaagaaatgggaagatgctgatactgaagaaatcgtcaataatatcgactactggcgttttgaaaaaggtgcaaaatggcatgcatttgatggctatgaaaataatcaatatttcattgatccaaacaaatttatgttaacaacaccagggattgatgttgaaaccggtgaatacgaagattttggtattcctgcaaccattcttgccaattatttacgtgaacatggtattattcctgaaaagaatgatttaaactcaattctattcttgatgacacctgctgaaacatcagctaagatggataatttagtttcacaaattattaagtttgaagccctagttaaagcagatgcaccattaaaagatgtattaccttcgttatatgaagcacataaagaaagatataatggttatacaatccgtcaattgtgtcaagaattgcatgatttctataaagaaaataatgcaaaggactatcagaagaagatgttcttagcagaacacttcccagaacaagcaatgaaaccatatgatgcaaacgttgaattattgcggaataacgctaagttagtcgcattaaaggacattcagggagaaattgcacttgaaggggcacttccttacccaccaggtattttctgtgttgttcctggtgaaagatggtcagaagtagctcaaaaatacttcttgattcttgaagaagggattaacaagttccctggatttgcaccagaaatacaaggtgtctattttgaagatattgatggttatactactgcatttggttatgtattagataaataatgatcaaacaaactttaaacgtagtgcacattctgatgtacactacgtttatttttatgatgaggtgagttaaatggcaaaagatgggaaaaaaatgagtgttatacagttaacaattatcactgccatcaatatgatgggttctgggataattatgttgccaactaatttagcgcaagtcgggacaatgtctattttatcttgggtggtaacagcaacaggggcgatgtgcttggcatacgccttttcacgggctggtatgtacactaagaaatcaggtggtatgggcggttatgctgaatactcatatggtaaagccggttcattcatggcaaactacacatatggtgtttcgttagtaattgcgaatgctgccattgcaatttcagctgttggttacgctgcagtgttgttccattggcatttgagcccagttgaggtagcgattggaacaattattacactctggttagcaactgtacttaactttggtggtgctaaaattactggtaagattagttcatttacagtctggggtgttattattccagttgttgtgatttcaattggtggttggttcttctttagtggcacaatgtacgctaatgcttggaatccacatcatttaagtttctttaatgggattagtaaatcaatttcaattacattatgggcgttcttaggattggaatccgcatcagctaatatggattctgttgaaaatcctaagaaaaatgttccaattgccgttttaggtgggacaattggtgctgcaattatgtatattatttcaacaaacatcatgcaagggattgtaccaaacagtgttttggcagcatcaaatgcgccatttggggttgcatttagtcaaatgtttaacccaacaattgggagtattgtacttgccttaatggttatttcttgttttggttcattactaggttggcaatttacgattgccgaagtgttccgcagttcagctgttgaaggctatttccctaaagtatttggaaaagtagttggtaatggcacaccaatcgttgggatggtcattattacaactttacaatctttattatcattaatgacgattagtccatcactttcaaaacaatttacggtattggtaaacttagcggttgttacgaatgttattccatatcttctctcgatgggagcattaaagacaatgcaattagatgccaaagtatcacctaaatcgatgaagataacaaatgcaattgcaatggttgctgctatttatagcttgtacgcattgtatgcggttggcttcagagaacttgcatatggttcattagtaacatttgcaggttggattttatacggaattgtttcacatcgctttgatttgaaacctgaaggtcaaaaatagtggtagtgattaattaattattcagtttaatcaatttaatcaattaaaaaagacgatcatgaagtgaacccccgatattggaccaaaatccaatatcgggggtttttatattgaccaaatattctaaaacatacaataaaaaacatcaagaacagatatcctgtatcattgaagttcctacacaaacaatggaagaggatattgtcttgatgcagaaacaggataccacacaccgccaaaaaggtcagcacttaacatcactcgagcgcggaaaagtggccggattccgccaagctgggaagtccaatcgttggattgctgctgaaattggcgtctgcccgcagaccattaataatgaaatcaagcgaggtacagtagatcaggtcaagaagagtaatggcaagcgcgtctaccatcgacaatacctgccagaggctgctcaggcacgttacgagactgcacgcttgagctgccatcgtcctgacaagttcgccagcgtacaggtcttcttagcctggtacgtacagcgagctaagcaggacaaatggtcgccggatgcttcaatcggctatgccaagcgacacaagctgtttactcctgaagagcttgtttgtgcctcgactttgtaccagtacattgacgaccaacgcctagagattcgaaatatcgacctgttggagaagactaagcggaagacctctcaccagcaccacaccaaggctaagcgcctggctggccgcagtatcgaggaacggcctaaggtcgttgaacgacgcaggcagttcggtcactgggagatggataccattgtcggtaaacgcaatggcaaggagagcgtcatcttgactctgattgagcgcaagacccgttgccaacttctccgcttgatcgaaggacgagatgcagactctgtgagctatgcattgcgtggaatcaagcgcgaatggggagcttgcatcaagaccatcacagccgacaacggacccgagttcaccgccttaaatactgcttttgctgggacggaaactgagatcttctacgcccatccttacacgtcctgcgaccgtggcaccaacgaggcacataaccggatgatccgccaggacttccctaagggcatgtccctagatgacattagccctagagtcaagtgcaggccacgcaagaccgcttgaatcagttgcctcgcaaacaacagggctactgcacaccccagcaaaactttgaggccgaagctcggcgcgttcgccgcatggcccagtagtctctctagcgccacaacttctatttgataacggcctgttctgggattgtcctcaacgactggctaacttgttcttgcaatttacgatttttaatgttttagaatatttggtcaatataaaaacccccgatattggattttggtccaatatcgggggttcacttcagagacagattttgtcttagcctctttttttgtgttacttttcaggaagaactcgcctaccagctctccgtcttaagtctgatttataagcgaattacttgaaagtttgacctattttgactattatagaattagtcagaataatctgacacttaatttaaaaaataactgaaaaaggaatgacgtctatgaatccagaacaaatgacacaagctgtccaagatgcacttgcagaagcgcagaaaatcgcgatgacgcgtcatcaaactgaaattgatattccacacctctttaaatatttagtccaaccacaacaactaggacggcaaatttaccaagaagccggtgcagatatcgatgctcttgaggcggagattgatcgtgaaattgacgcaattccaacggttgaaggtcaaacgaattacggtcaaaacatctcacaaaacttgtaccaagtattaactgctgctgaaaaatacaaaacagaattccaagatgaatttttatcaactgagacggtcatcttgggcttaatgggtttgaaataccaggcactcgttcaatatttacagaaacaaaatgtcactgaacaaaaattaaagaaagtcattactgatttacgaggaggcgagcgtgtgacatctaaaaaccaagaagataattaccaagcgcttgaaaaatacggaacggatttaatcaaagcggtccgttctggcaaaatggatccagttattggccgggacgaagaaattcgagatgttattcggattttgtcacggaaaaccaagaataaccccgttttaattggggaacctggtgtcgggaaaacggcgattgttgaaggattagcgcaacgaatcgtccgtaaagatgtgcccgataatttaaaagataagacaattatttcactggatatggggactttaatcgccggggccaaataccggggtgaatttgaagaacgacttaaagctgtgttaaaggaagttaagaagagtgaaggtcggattctggtcttcattgatgaaattcacacgattgttggtgctggtaagactgaaggtagcatggatgctgggaacctcttgaaaccaatgttagcgcgtggtgaattacacatgattggtgcgacaacgttggatgaataccggcaaaatatcgaaaaagataaggcgcttgaacggcgtttccaaaaagtgctagttcaagaaccatccgttgaagataccatcagtattttacgtggtttgaaggaacggtttgaaattttccacggtgtccggattcacgataatgccttagtcgcagctgcgacgttgtcaaatcgctacattacggatcgattcttaccggataaggcaatcgacttagtagatgaagccagtgccaacattaacgtcgaaatgaattcacaaccaacggaattggatcaagcaacgcggcaattaatgcaacttgaaattgaagaagaagcgttaaagaaagaaaccgacgccgcttcgcaaaaacgattggctgagacgcaaaaacaattagctgatttacgcgaaacaacgaataatttaaagatgcggtgggaaactgaaaaagaagatttgaaccgcattaatgataaaaaagcggaaattgatgctgctaaacggcaattagaagaagcacagggaaattatgatttagaaacggctgctaagttgcaacacggcacaattccacaattagaagaagaccttgccgaccttgaaaaggctgaaaagccagaggactggatggttcaggaatccgttactgaaaatgaaattgcaacggtggttagttcccaaactgggattccagtcgccaaattagttgccggtgatcgacaaaaattactgcgtcttgccgatgttctgcatgaacgggtaattggtcaagatcaagctgtcaatgctgtgacagatgctgtattacgttcacgggctggcttacaaaatccagaccgtccgcttggctcattcctcttcttaggaccaacaggggttgggaagaccgaattagcaaaagctttagctgaggatttatttgattctgaacggcatatggtccgcattgatatgagtgaatatatggaaaaatattctgtatcacgattggtcggtgccgcaccgggctatgttggctatgaagaaggtggccaattaactgaagcagttcggcggaatccatacacaattgtgttattggatgaaattgaaaaagcccatccagatgtctttaacattttattacaagtgttggatgacggtcgtttgacagattcacaaggacggacggttgactttaagaatacaatcatcattatgacttctaacttgggttctgaaatcctactggacggtgtagatgaagaaggtcaagtttcacaaacggctaaggaaagtgttcaagccttaattcagacgaaattcaagccagaattcttgaatcgaattgatgatacaattatgtttacaccattgagcttgaacgatattcaagcgattgtggtcaaaatgcttcatgatctatcagaccgtttgtcagatcaagaattgacattgacgatttcagatgctgctaaacaatgggtggcagaagaaggttacgatcctgcatttggggcgcggccattacggcgttttattacgaaccatatcgaaaccccattggctaaagaaattattgccgggcatatgttaccaggaaccacggttgaaattaacttaaaagataaccagttagtttttgaaaatcgctaacgattgaaaaagcgctacaaatttaatttgcggcgctttttttggacatcaatcagggattattactgtcagattgatgtttgtatggtacacttattagggatgatgtacagaatgttagtgacgattaaggacgattccactttgaaagtggtgtcattaagagtcgttaatcaattgtttttctgtaattgacttgctcttagcggataaacatagtattatagaagtcgcggacaaaagtagcgggacacgtgatgatttaaaatcaatttgaatgggattgagataatccttgccaaattccccgagttcggtatatcattaatgaatctaagatataaaggagtctgaaaataatggcagttccagcaagaagaacatcaaagacgaagaaacgtatgcgtcgtggacatatcaaattgaacacaccaaacgtacaattcgatgcaactaatggcgaataccgtgtaagtcaccgtgtatcaccaaaaggtttctataaaggcgaacaagttgttacaccaaaagctaacgactaatcgtcatcgagagtttctgaataagaaactctttttttatgcagtttcctagttttaaatactagatggtggtataatgagtattgaataaaaggagattgataattatgaaaaatgaacacttgaaacaaaagctcgatcgtttacaaattgtacgcttaccacgttggacagacctgcccgatttggaactatatatggatcaagtggttagttacatcaatcaatacctaaacgcgttaaatttagatgaaatcaccgcttcaatgattaataattacgtcaaaaaagaaattgtggcagcaccgattaaaaaacggtatacaaaatcgcaaattgctcaagttttaattattgcactattgaaaacgagtttttcgattgaagaaatcaaacaattgatgacagcggaaacacctaaccgaaatgaaaagcaactttatgattactttatcttaacgtttttagcagcgattcatcagttagatgaggattacagcccctatgaccaaggcaaaaatccagcaggtacattggtcactgaaacccaacaaacattgctgaaattagcatgtcagagtgtggtatataagattgcaattgggattactttgaagaaagaaccagttgaagaaaaaacgccagcaaaaaataagtaattgactagaaaatgagaattgaattaagattcacaaataattcaattacaaaaataatgaattcgtttacctctttctattttcgccgtaaaataaaggtaactaattagtttattaacaaatgttagttaactaatttttattcagaggattaatcattgtggttaagtctgaaaaaaatgaaagaggtgttttaggtggcagaaaagaagaagacgaataagttaacgcttggtgcgcttattctaatggtctttacgtcagtctttggatttacgaatatcccacgtgcgttctacttgatgggatatgcatcaattttttggtatgttttagcagctgttaccttctttattccttatgcatttatgctcggagaaatgggagcggcctttggtgaagcaaagggggggatttactcttggatggagaaatccgttaacgctaaatttgcctttgtcggcacatttatgtggtttgcttcatacattatctggatggttaacgtcgggaacgggatttggattccattatcaaacgcctttttcggggttgataaaacacaagaatggtcaatctttggtttgacaaatggtgtgcaaacattaggaattttagctattatttggatcattgtcattacctttgtcacatcaaaaggccttgataaaatcaagagaatcaccagtattggtggttcagccattacgttaatcaacgtgattttattcttgggtggtttgttaatccttgttttaaataaaggggtaatggcacaacctgttacaacccatgcattcttccaatcaccaaatcaaagctatacatcgatgattcaagtcttcagtttcgttgtatttgcgatcttcgcttatggtggtcttgaagttgttggtggattagtagatgaaactgaaaacgctaaggttaactttccaaaagggttagctatttctgctgtcgtgattgttgtcggctatgctgttgggatctttatgatggggactttcactaactggaacttcgtctttaccaatggtggtggcttcgccaaagcaaccggttcaaacgcaaccgttactttggggaacgttgcttatattgccatgaacaacatgggttaccaattagggttagcaatgcacttaagtgaacatgctgctattcaagttgggatttggctcagtcgttacatggggctttcaatgttcttagcacttagtggggctttctttacaattattttctcaccattaaaaacaattatcgaagggacacctgctgccttttggcctaagtcatttactaagaaaaatagtaataatatgccggtcaatgcaatgaaggtccaagctgcaattgtaattgtgattattgccttcgttgcttttggtggtaagagtgctgctaagttcttcgatatcttaacagcgatgacaaacgtttcaatgacattgccatacatgtttgtggcatactcatactttggctttaaaaaggatgaaagtatcgaaaaaccatttacaatttataaagggaagaccttctataaattctgtgtctgcatggtcatgttcacagttggttttgcgaacgtctttacgattattcaaccagcaattgatggtaatttaagtcaaacaatctggtcagttgctggccctatcttcttcacaattgttgcattatatatgtttaaccgttatgaaaagaaaacaaatttaaaataagtttttaaaagagcggccgttaagtggtcgctctttttgattggtcttaaaaaatgtgacacttcgtcgttttcgcttgaattgtgattctaaaagggttaatctaagatttcaatgagttaaatttcaatgaaaaggtgacgaatatgaaaaaaacaattgttggtttagtgaccagcttagggctaatcggtctattggctggttgtgggacaaccaaattaacaacgactaaaacaaattatcgccaaaatggaatggtggcagtcgtaaaaggttcaacaaccaaaaaagctgatttacaataccggattaatcataatcatttccaaaaagcaacggtcaaagacggaacttatgtgattcaagtaccaacaacgactaacaaacaaacagtaacggtacaagctaaagcaaacggtaaaaccgttcaaaagaaggtaacgattgcagcgggcacatcagttggccaatatgccaagattgccgcgcaatacaaccaggctttaattgggatggcgttatctaaggcagatcaaaccaaagcgcaggaattgcaaaaacaagcagcagctgccaaagcaggccaacttgcacctgctgatctgatgacacttaagcagcggcaacaggaagtacaagcagcaatgcaacaggtgcaacagacacaaaaggatcaattgctaccaaccacacctaaaaatggggtgactgaatgggtcgcaacaaagcatgtcaccattcgcggttctgttgatagtcaagatgtaatggggatgacgctcattacacccgttaaagcgctcaaagataaagcggcattgaaagattttgggaccagttttgcattgattgcgcaagcaacgggcgctgattccaaaaaagtgatgtccgaatttagcgattatacgaagaaaaacaaaaaaggtagtcaaaccacgatgaagacgattgaatcaaatggtgtgaagttcaataccggtttttcaacaagtgatttgtatatttacattacaaaataaacgtaaaaagggccgcaacataaagttgcggcccttttttgtgctttatttagctggatcttttggtaagacaagaggtaagaagttgagcaaaagcccaaaaataactgagacgataacagttgtttgaatgttaaagccggttttcgttagtttagaaccgataaatccaatgacaaacccaaaaatcaatgtccaaagtagattcataacgtatttcatagttggccttctttctttgattcaattctatgatattgtaacacgttttccaaagagaatcatttgaaataatttgttatactaagagtaatcgaattaacgaagaaagaaggggcgttgcttgccattcgttcaactacaggttaagagtacctatacgctcttggaaagtaccactaaaattgatgcactgattgaaagtgctaaggcgcgcggctatcagagtattgcgctgacggataagaacgtgatttatgggctagtcgatttttataaggcggccaaggcagctgacttacatccaatcttgggtttaacgcttgaaattggcggattacttcaaaccgatgaacggtttccgctaattgtattggcgaaagatttagttggctatcagaatcttttgaagctttcttctaaagtgatgactcaaactgatctggtttcatttgctgatattacacagtggttcagccatttagtagtgatcacgccggctcaagatggcgaattagtccgcctacttttgcaagcggaggagcaaacaacggcatatttgacgcaactccaggcggcagttgatccggggagcttgtacttaggaatcagtgccaagcgagcagcagccccccaacttagcgggttaattgcattgagtcagacgaccggagttccgctggttgcattaggtgatgttcgttatctagaaccagatgatgctttttcagtgcaagtcttacaacatattaaagctggtacgcaagttaatctccatagtggtgatcagacaacgccaggcggctattatttacagactgctgatcagattacggccgagtttgaagcattgcagttggtcgaggccgtgcacaatacggataagattgcccaactctgtcaagttgagttgacctttaagcgggcccaattaccacgctttgaaacaccgcatcaagagtcggcaacggcatatctagaacagttaagtcagcaaggcttacaagttcggtttgccgatcaagcgattccgcaagaatatcaagaacgcttgcagtatgaattgcgagtgatcaacgagatgggctttgccgattatttcttaatcgttgccgatgtcatgcggcatgcccatgaacaacatattatgacgggcccagggcgaggctctgcggcagggtcgttggtggcctatgctttaatgattactgatgtcgatccgattcaatatcaattgttgtttgaacgttttttgaaccccaatcgggcgaatatgccagatattgatttggatatcccagataatcgtcgggatgaagtgctggcctatgtctatcacaaatacggtcggaatcatatggcgcaaattattacatttggtacactggcagctaaaatggcgttacgtgatgtggggcgtgtgtttggcttaagtcagtttgaaatgaatgattgggctaaggtaattccggacatgctgaaaatcacgttaaaagaagcttatcaacaatcacaaccattgaaaaatttggtggccgattccactcaaaatcaattactattcgagacagcacagaaacttgaaggactgccacgacactactcaacgcatgcggctgggattgtgttaagccaagcaccgttaactgatacggttgcattacaaagtggcggtgaagagattgaacttacacaattgccaatgggcaacgtggaagaactgggcctactgaagattgactttttaggattacgtaatttagggattcttgctaatattgtaaagcttgttggacagcaaaagggacagctgtttgacccacactcaattccgttggatgatcctaaaacacttgcattattccaacaaggtgatactaatggtattttccaatttgaatcacttggcattaagaatgttttacggcggttggcaccgagttcttttgaagacgtcgtggcgacaaatgcgttgtatcgaccaggtccgatggaaaacatcgacgtatttatcgctcgtaagaacgggcaagaacctgtcacttatccggacgcgtcgttagccgatattttagagccaacgtatgggatcttagtgtatcaagaacaagttatgcaggctgcgtccaagatggggggctttagcttaggcgaagccgacttattgcggcgagcaatgagtaaaaagaagaaggcggtgattgatgctagccggacgcaatttattcaaggcgcactcgaacgcgggcacacagaaactgctgctacgacagtctacgactatattgagcggtttgccaattatggatttaaccggtcacatgctgttgcttatagtaaaattgctttctggttggcttatttaaaagttcatcagccagcagccttttttgcagctttattaaatgccgttttgaacaatccgacaaaaacgaaaacttacttagcagaagctaagaaacgtcaaattaaagtgctgccacctgatattaaccgcagtcaaagttatttcagattagccgactcagggattatctttggtttgttcagcattaaaaaagttcggcgcgattttgtggcggcgattattcaagaacggacaacgaacggaccgtttaaatcgttactggccttcttacagcgtatggatcctaagtttctcaagcaagaggcattagaagccttgatttatagtggcgccttcgatcagtttaatccgaatcggaatgcgctgttgaccaacttagccgacctgcttgatagtgtgaagttgtcagggaataacgtcgatttatttgctgttttagcaccgaaagaacgtgccgtaccgaatttaaccttgactgaacgattggataaagaagccgaatatcttggggcctatgtttcggggcatccggtcgaaaaatatgattgtgtacgccaacactaccatgtgcctgatatcagtgatttggcacccgagcaaacggtccatttggtgctattcattcgccgaattaaggtgattcgaacgaaaaaaggcgatcaaatggcgtttgtaacggggcaagatgcaaccggtgaaattagtgtgacgctctttactggcgtttatcaacgggtcagtgaatggctacaaacaggacaagttgtttttatcaccgggaaagttgaacaacgtcgcgatttacaagtggttgctaatcagattcaattggcacaagatgcacaaaagacgctacccaaagcgaccctttatttacgggttcaaacggcgttgacgagtcaagtgcaacaacaaatgtatcaattgttacaacaaaatcacggaacaacgccagttatcttgtacaatgcggccgataaacagtcaattctattgaacgagcgctattgggttgtgagcaacgaaaaactaacgaccgcgcttacaaaccttttagggacgggaaatgtgattttaaaagggtttgaccaataaagaaattggtctatctttgcgaaaatcttcgcaaaagacaagacttattttctgaaaagtgataatatattagtgactttaaaagaccaattggttttttaagtaaaatatttgcctggggtgaaaagatgaaacgcataggtattttgacaagtggtggggatgcacctggtatgaacgctgccatccgtgccgttgcaagaaaagcaatgcatgaaggccttgaagtctatggtatcaattatggttacgctggtttagttgccggagatatcttcaagatggacccaattacggttggtgacaagattcaacgtggtgggacattcttgtactcagcacgttatccagaatttgcacaagtcgaaggacaattgaaaggtattgaacaactcaagaagtttggtatcgaagctttagttgtcatcggtggtgatggttcttatcacggtgcacttcgtttaactgaacatggttataacgcaattggtcttccaggaacaattgataatgatattccatttacagatcaaacaattggtttcgatacagctgtgaacacagtgctcgaatcaattgaccggatccgtgatacagctgctagtcacgaaagaactttcgttgtggaagtaatgggtcgtggcgctggtgatatcgcgctttgggctggtgttgccggtggcgcacaagacattattatccctgaacatgatttcgacgttaaggccgttgctgataagctacgtacttcacgtgaacatggtcaaaaacacgctgtcattgtattggctgaaggtgtgatgcacgctgatgaattctcagaaaaactttctgaatacggcgatttccacttacgttcaactgttttaggacacgttgttcgtggtggggcaccaacagctagtgaccgtgtgttagcaagtcgtttgggctcaaaagcagttgaattattgcttgaaggcaaaggtggcgttgcacttgggattgaaaagaacgaaattatcgcacatgatatgttagacttgttcaatcacaagcatcacgcaatgttagatctttatgatttaaacgaagatttagcttactagattcatcgttccatatataaaattgttaaaacgactgaaaagtcttttaaaaaatagacataaaaggagagattccacttatgaagaaaaccaaaatcgtaagtacacttggacccgcaagtaacaatgttgaaactatcacaaaattaatcgaagcaggtgctaatgtattccgctttaacttctctcatggtgatcatgaagaacatttaagccggatgaacatggttcacgaagctgaaaaattaactggtaaaacagttggtatcatgttagatacaaagggtgctgaaatccggacaactgttcaacaaggtaagaaatttgaattacacactggtgaagtggtacgtatttcaatggacgatacacttgaaggaacacctgaaaaaatcgctgttacttacccaggtctatacgacgacacacatgtcggcggacacgttttaatcgatgatggtttagtggatcttaaaattattgaaaaagacgaagcaaacaaagaacttgttactgaagttcaaaacgacggtatggtcggctcacgtaaaggtgttaacgcacctggtgtttcaatcaacttacctggtatcacagaaaaagatgctagcgacattcgttttggtttagatcatgaaatcaactttatcgctgcaagttttgttcgtaaacctcaagatgttttagatatccgtgaattattagaagaaaaacacatggaacatgttcaaatcttccctaagattgaatcacaagaaggtatcgacaacattgacgatatcatgaaagtttcagatggtttaatgattgctcgtggtgacatgggtgttgaaattccatttgaaaatgttccttttgtacaaaagaacttgatcaagaaatgtaacgctattggcaaaccagttatcacagctacacaaatgttggactcaatgcaagaaaacccacgtcctacacgtgctgaagttaacgacgttgctaacgctgttattgatggtactgacgcaacaatgctttcaggtgaaagtgctaacggtgactacccagtagaagctgttgcaacaatggctcgcattgatgaaagaacagaaaaatcattaacagaccgcgatgcatacgcattgaaagcatacagcaagactaacttgacagaatcaattggccaagctgttgctcacactgcacgtaacttaggaatcaagacaatcgttgctgctacagaatcaggctcaacagcacgtatgatttctaaataccgtccacaagctgacatcttagccgttacattcgacgaacgtacacgtcgtggtttaacagttaactatggtgtatacccagttatcgctaagaaacctgctaatacagatgatatgttcaacttagctacacaaacagctcaagaacatggttttgctaaagaaggcgacctaatcttgatcactgctggtgttcctgttggcgaacgtggcacaacaaacgttatgaagatccaattaattggttcaaaattaacacaaggccaaggtgttggcgatgaaacaatcgttggcaaggctgttgtcgcttcaaacgctaaagaagctgctgaaaaagcaattgatggtggtatcttagttgttaaatcaactgacaaagattacttaccagcaatcgaaaaatcaagtgctatcgttgttgaaaacggtggtttaacatcacacgctgctgttgttggtatcgctatgggtattccagttgttgttggtgctaaagacgcaacagaagctatcaaagatggcgaagttgtgactgttgattcacgtcgtgggattgtttaccgcggtgcaacaaacgctctttaatcattcctgaatgatgaaatgaagccccctctgaaaagagggggctttttttgttttaaaaatgcgaatcttgaattacttttctgaaagtactgacaagtcgttcatttatcggtacaatagtagggagactttattggaggtttacatggaaagttggttatttttagtagcgattttaatcgttgcattgttagcgaaaaatcaatctttaatcattgcgaccgcggttgttttaatattaaaggtattcccgatttcaaataaggtgctgcctgtgatccaagccaaaggcattaattggggagtgacagtgatttcggttgctatcctagtcccgattgcaacagggcaaattggtgtcaaagacttaatcaatgcctttaaaacgccggcgggttttattgcagttggttgtggcgtgttagttgctgtactatcagcgaagggtgtggggctattgtccgctagtcctgagatgacagtggccttggtttttgggaccatcatgggtgtcgtttttctaaaagggattgcggctggccccgtaattgcagcggggattacttataccattttaacggtctttaatttagtaccaattcattaattaataagaataaaagaggttaactatgaatgaattaatcgggcaagtcattactgccttagtaacagatgaaaatgaaacagccttctttgtccaaaaagacggcgtgacatttgaattaaaaaaagaaactttagaacaagaattgacaatcggtgaaacggtgactggttttgcttatgaaaactcaagtcgggaattgatcttatcaacgtttattcctaaatcacgcgtgggccattatgcctttggtgaagtggttgaaacgcggcgtgatttaggcgttttcgtcaatattggcttgccagataaggatattgtcgtatcactggatattttaccaaccattacgaaattatggcctaaaccaggtgatcgtttaatgattgcgattgaagtcgatcaaaaagggcggatgtggggccaactagctgacgaaagcatcttcagatcaatttcaaaaggtgctaaaccagaaatgaagaaccaagacgtgatggggacggtctaccgtttgaagttagccgggacgtttattttaacggatgacttttacattgggttcattcatccttctgaacgtgaagcagaaccacgtttgggtcaacaggttaaggggcgcgtcattggtgtgcgacctgaaggtagtttaaatgtcagtttgaaaccacgggcatatgaagaaattggcgacgatgctgaaatgattatggctgtcttaaaacggcaacctgattacgcaatgccatacactgaccggagcgatccagaagcgattaagagttactttgggattagtaaaggcagttttaagcgggcattaggccggttaatgaaaaatggcttaattactcaagcagagggcctaacgagtttaactgaaaaaggtcaagctgatattgccccaattacagatgacgagaagcaagactaagcttttttgaatgattgaaaaggaagttgctaaatggataaagctgagcaattagaccgaatatccgagcagctacaagcggccggctacaagttaacagcacaacgctctgcgacggtggcggtcattttggaccatgcccaagcgcatctgagtgccgaacagatttttatggcaactaaagaggtggtccctgaaattgggttggccactgtgtatcgcacccttgagatgttgacggaactgcatgtgttgaataaagttcggttcattgaagatgggatgacccactatgacttgtgtgagactgatcacgaccatcatttccaccatcacctgttgtgtctgcaatgtggggcaatcgaagaaattcatacggatttattgcctgccgtggaacaacaggtatatgatgattacacatttacggtgttagatcatcgtttaacatttcacgggatttgtgcacgttgccaacagattaaccaacaaaatgggttaccagccaatcaactggatcctagtcgccaaattgacgtgacgcagttgtaaaagaggaagtacatggatgatttaattcaagattatttacattatttaaaagttgaacgcggtctttcggagaatacgcgccagagttatcggcaggatttacaacagtttgcggcgtttttacaacgtcagcaggttgccaattttactgaagaccgctttttaattttgaactacttgcaagaacaaactgatgtgcataaggcacaaagtagtattacacggagcatttcaacgttacgtaaattctatcagtatttagcgcgtgaaaagcagattaaacaaaatccgatgctccaaatcgattcgcccaaacaaggccgtcatctaccggctgttttatcgacggcggagattgagcgactattggcggcaccagatacgagcaccgcacttggattacgagatcgagcgattctagaggttttatatgcgacggggttacgagttagcgagctgattcatctaaagatggctgatttgcatttatcactgggcttaattcagaccctcggcaaagggaataaggaacggattataccgattggtgatgtagcggttgattggattaatcaatacctcgatcgtagccggaatcaattaacgaaggggcgtgctaacccgtacctgtttgttaatttccatggtaacgggttgacgcgccaagggatttggaagaacctgaaggcacatgttaaaacggctgggattgaaaaagacgtgaccccacatacattgcggcattcgtttgccactgtgctacttgaaaatggcgcagatctgcgaattgtacaagaattattggggcattcagatatttcaacgactcaaatttacacgcatattagtaagaaacatttgacagaagtttaccaatggagtcatccacgcgattaaattagatttgtcgcgctttataaactatggtagagttaatgctattagaactttgtttgatcaatggaggtcaacatgttattcaagtataaaaatgattatgaaaagattgcgatgggctttttatccttcgtaccggatttaaaagaagtcagtcatgtacaagctgaattggcgctctatacgtcggatgagcaacgcaatttatatttatggcgcaatgaagccggcgattttgccggtgttgtggggattgaactgggtgcggactatattttagtgcgccatatttcactgaacccttcggaacgtagcgacgagaactatttcaccatgttggatgaattagcggcgctttatcctgaaagtcgcgtgatgggttcgttagagactgcgccattgattgctaaatgggaacaacatcagaatacagaaatggactagattgaccaatgactgaacaattaacgttggtcttgactgattttgaaggaccactcgatttattattacatttaattaagcaaactaagattgatatttatgatattcccattgctgaaatcaccgcgcaatatcttgattacttgcaccaaatgcaagtattgaaactagatgttgcaggtgattatttagtaatggcggcgacgttgatgaagattaagagtaagttgctcttacctaaggcacctgaattaattgaagaagaaacagaagaatacgtcgatccacggcaggaattagtggaccaactattggcgtaccaagccttccaaaaggtcgcaacggttttgcaagagcgcgaattggagcgccaacagctctttgctaagccagctagtagtaatccagctgaaaaagtggtcccactggcgcgcggcgtgattaagccacgcgatttagcggccgcagtttctaaaatgttggtcgaagcccaagctaaacaaccggtcttcaaaacggtccaaaatgacgaaatttcgattacggataaaatgagttggattgtgcgtcatttagccgctcaaccagttgcttttgaagcgttggtcgttgttaaaacagatcgagatgaaatcgtcacaacatttttagccgtactagaattgatgaaggatcgaaaaattatttgcgaacaagccgactatgatgcaccaatcatggttcggttgaaggagggcatttcagttgaatcatctcgctgaaattgagagtttattatatgtcgcgggggacgaaggaattgcgcttgcgcaaattgcgcagcttattcatctcgatgaaccggcagtccgccagttattagaaaaattggcaaatcgttaccgcggcaacactgaatcgggtttgaacctgattcaagccgaagatatctataaattagtcaccaaaaaagaatacgcgacgttgttgaagacctattttgatggaccggtgtcaactagtattagtcaggccgctcttgaggtattggcaattattgtctatcgccaaccaatcacgcggattgaagtcgatgaggtccgaggtgtccaaagtagtggggccatccaaaccttgttagcccgccaattaattagcgaaaaagggcgtaaggatgcgcccggtcggccaattttatatggaacgagcacctatttcttagattactttggtcttgaatcgctcgatgaattaccaccacttgaacaattggcacttgacgctgatgtcgatggtagtgaaggtggtacagcagacttgtattaccgtcaatttgaacaaacgttaaatgaaacagatacgacgtcggaagagacgtccaaaggagaacaataaatggaacgattacaaaaagtgattgcaaatgctggggtagcttcaagacggaaagcagaaaccttaattgcaactggtcacgtcaccttaaatggtgaagtggtgaaggaaatgggtatcaaggtggatagcacaagcgatcatattgaagttgacggtgtgccgttaacgcgtgaacgcaaggtctattatgtcttgtataaaccacgccaagtgatttcagcagtgacagatgataagaaacgccgggtcgtcactgaataccttggcgatatcgttgaacgggtttatccaatcggccgattagattacgatacatctggcttattactactaacgaatgatggtgattttgccaacatgatgatgcatccaaaatataaagtcgacaagacttatattgcgaaggtttcaggattaccaactgcagatatgttgcgccaattgcgtaaaggaattgtcttagaaaaacgcaaaacagcaccagccaaggtcaaagtaatttcaactgatcggcgtaagaacactgccattgtaagcatcaccattcacgaagggatgaatcatcaggttaagaacatgctagctgcggttggcctacccgtaacaaagttgaaacgggaaacatatggtttcttaacgttagatgggttagtttctggcgaataccgtgctttgaaaccaatcgaagtcgcagaattcaaaaaaattgctgaactaaatgaaaaaccacagcataagaatcgaccaaaattatcacggcatgattaattagttgcttttggcacgttgatttgctatgcttatttcgaacaaaatattaatggttcgtcttcaggggcagggtgtaattcccgaccggcggtaaaagtccgcgacctgctacaatgttgattcttgtggtggctgaactggtgtgattccagtaccgatagtgaaagtctagatggaagaagatagggcttatttgggtatgaatgtatgcaagtaaggtctgttaatctccctgattaacagacctttttgatgcaatcagacttggctaagtccgctgacgaaggcaacctcatctggagggtgttagtaatgcaagtttcaaaagttcgtacgatgattggggtcgcaatgctaggggcaatttcatttgtcgtcatgtttttcgaatttccaattattctcgcatttccgtttttaaaaattgattttagtgacgtgattgtcctgttagggacgttcgtttacggaccaattggaggaatgggggtcgcattgattcgctcgacgcttcatttcattatgaccggtgctagcttaccgagtttggtcggcgactttgccggtgtcttggcgtcaatctgctacttgttaccattctattatttattcaagcgtcaatcgaacgttttagtaggtcaagcaattgctggtgttgcgggggctgtcagcatgacgatcttcatgtcatttgctaactggcttttcattttaccgctctatattaaattgatgggtttgaacttaggaatgtcgactaccaaatacattctatttggattagtaccgtttaatttaattaaaggtgcactcgtaacggtggtgtttgccgttttatatttacggattttaccatggctaaaacaacatatgcaaaaaccaattgccaaataaatggcagcaaaaaaggttgtgtccaagcgggcacaaccttttttataggacgtaaatatgctacgataaaaatggcgttgattggcgtacaatcgcaccagttggacaggcggtgtaggcggttttaaacgcaattcgttctttaggatcttcaattggcgtcgttccctgattatgatcgggtttaaaaaaggcgatcccttcttgatcgtaatcgaataagtcgggcgcctttagctggcagagaccgcaggcgatacagcgttccgggatgacttgactatagagcattaaattcacactttctcaataaaggacttaattgatgatgttaatggcgtatctactatgcttgttggcgcctgagaaaaggcggtatcaagcaatctactataccttaattggtaaacgaactacttcaaatctgtatgccggtttagcatatggattattaaaatggctccaaatttatcctaatctagaacaggcacaatttcaagcagaattaaaacgacttcagcaaaatggttggattgaaatcgatgagcggtatgtttggttgactgctaccgggcaacaaaaacaagctgaatggcagccgcaattagtttggccgacgcactatgaaggcccacagatgggtcacttaccccaattcactgctcgttttatgttggccgttcaaattgtgtcggaatatcatcatcaaaatacgcagtactatccattggaaacgagtatgaaggaccgcgtgttggtggtcagttggtttaagcggcataaggcaaccatcaattttagcagtcaattccagctagaattggcgcaattacttgaccagttagatccgcaacaagccgatcttgtggcaaatcaactgatcggacatcaagtcttgggcaaaagccaccaacaactggcgcaagccttagatagcccatccttgacagttcgtgtgcggaccatcgacgcctttgctcaaattttagggcttttattggcgcaccaaacgacttatccgctattgaatgaattagtggatcaggctgaaacgcaattgagtcagagtacgttacagacctggcaattgatccaacaaggggcgagtgttaaacaaatcagccgccagcgccgggttaagatcggaacgattaaagaacaccttttagaaaccgcgatgttactcccacggtttccgtttgaacaattcttaaaggatgcaactacacaaaaactagctagattgatgactgaacagccatcgctcagctataatgaagcacaaaccgcactccccggtctagatttctttgagtatcggctttatcaaattcaaaggcaggtgaacgcccaatgagcacggatgaactgatttataaaacgctaaaagagcggtttggctatgagacatttaagccaggacaattagaagtgattcaatctgttttggcgggccaagcgactttggcggttttgccgaccgggacgggaaaatcattatgttatcaattaccagcctatcttttgggccataccactgtcattatttcacctttaattgcattgatgcaagatcaggtcgcacagttgaattaccaaggtgaaaaaaaggcagtcgcgattaattcaaatttggaaccgcggcaaaagcatgcgttattgcgacaattgccacagtatcgtttcgtgtttatggcgcctgaaacgataagccagccggcggtcattcaagcactacaacaatgccagattgatttattggtcatcgatgaagcccactgtatttcacaatgggggattgattttcggccggattatttagtgcttgcgcaaatcaagcaccaattaaatccgggggcaacgctcgcactaactgcaacagctgatgcacaggttcggcatgatattttagccaagctagatttgcagtcggccaataggattattacgtcggttgatcgtcctaatatttacttaggggtgagtcaacaagcggatgaagcgagtaagcacgcctttttgcaacaattggtaactgagagtcaggggcccgggattatttatttttcaagtcgtcaaaagaccgtcgagattgcggcttttttgcaacaaaagacagcgatgcgagttgcctattatcacgcagcgctttcgccacaggagcgcttcattattcaacaacagtttatgcaagggcagttggacgtaatctgcgcaacgaatgcatttggaatggggattaataaagccaatattcgctatgtgattcactatcatttaccgcaaaatatcgaaagttatctacaagaagtcggtcgtgcagggcgcgatggccaaccagcctatgcaatgttgttagcaacaccgcaagatacgtatctgcaacagtcgttagtgtcatttgggattcctgaagctggattgattcggcgtttctatcaagaaccgacattatttaaacaaagccaaggcaacgagtttgaattattacggcggtatcagcaaattgggatggatgaacaggccgttagtgaactgttacagaatcggcaaaaagaaaagcgttttgcgcttcaaacaatggttgattatttaaacttacaaggctgtcggcggcaatttattgtgaactattttgacgagcaaccccaacaggttgcccatgctgatcaatgttgtggtcaacaggattcaacggtctttttagaaaaatttaatttaaaaacgttaactgatgataaatcccctaaaatagacgggttagaccattgggacggtattttgaagcaattgttttagagattttctgggtattttaaaagggtctatggtacaatatcaaagaataccaatagggagggccgtcaatgctcaaagatgataagaaaaaattagataatcagacggaagacaaaccctgggaaagccagtttgatgatgatcgtgatgatcgcgggaatttatcgcgtgttgcttccaagagtaaggaaaaaggaaatacatattttgccattattctaggtgtattgcttgttttaatgattgcatttccgattattgcctatacgattcattctagccgggctaaccgcccagtcgagtctagtaagattgtcgttaatacttctgatagtgatagtgcttctaagaaagaagctaaaaaagcgaagtctgctagcgaaagtgctaccaaagcggccagcgaaagtaaagctaaacaggctgaaagtgaaaaagcggctagtgaaagccaagcagttgaaagtagcaaacaagctgcagaagaagctgaaaaggctaatagtcaaagccaagctcaagcagacgctcaaaatagtagtagcgaagaaacaacaactgaaagtagcagttcaagcgaaacaacgggtggttcttatacgttgaaagccggcgaaggtttataccgcgcagcggttaataacggtttaacactcgatcaactacttgcattaaaccctgggttaacagccaattcacaagtggcaccaggcacagctctaaaagttaaataatcagtactaccaaaaggcctggggaaactcccagccttttttaatgattttttcaggaggcagaacatgcaaattgcaattgatggaccagcatcatctggtaaaagtacggtcgccaaaattgtggctactaaattagggttcgtatacgttgatacgggtgctatgtatcgcgcatcaaccgtgttagcacagaagttagggttagacttcggggatgaagcgggaattttagcagctttaaaagaagcagatatccaatttaaacctgaccaagcagggcaaaaagtcttcttgaatggtgaagatattacattagccattcgaacccctgaaattacgaataatgtctcacaagtatcagctttagctggtgtgcgcactgagatggttgcacggcaacgtcagattgcagatcaaggtcaagtcgtcatggatggacgcgatattggaacaacggtgttacctgctgcgaaggttaaaatttttatggtggcaagtgcccaagaacgagctaaacgccgttatgctgaaaatacagctaaggggattatgacgcctttagcaacgctacaagcagagattgaattacgtgatcaaaaagatagtacacgggccatttcacccttaaaaaaagctgacgacgccattgaaattgatacaactcagttaacaatcgatgaggtggtcgacacaatattagcaattgtaaagaaaaatatgtaattttatctttgaacgaggtaaaataactggtaatccgaatagatatcaactaaaatagtaactgtatagatagtcgttaaggaggattttagctatgagtgaagctaatttgaataacacccaaagcagcgatgcaatggcagctgctttagacagtgtccacgaagtcaaaattggggacgttgttaaaggtgaagttttagcaattgaagatcgacaagtgattgtcggcatcgaaggaactggtgttgaaggggttgtgcctcaaaaagaattatcaagtcaacctattgaagacatcgcagacgttgccaaagtaggcgaccaattagatttagtggtcatttcaagaatcggtaacgataaagaaaacgggagctacttattatctaaacgtcgcttagaagcccgtaaagtttggtctgaaattgaacaaaaatttgctaatcaagaaacaatcacagctaaagttatcgacgtggttaaaggcggcttagtcgtcgatgctggtgtccgtggcttcgtaccagcttcaatgatttctgatcgtttcgtacgtgatttaagcagctttaaaggccaagaattaaccttacaaattattgaaattgaaccaagtgaaaaccgtttaattctttcacgtaaagcattattggaacaagaacgtcaagctaagttacaagcagtttttgaaaaaatgttacctggggatgttgttgaaggtgaagttgctcgtttgacaaactttggcgcattcatcgatttaggtggcgttgacggcttagtccacgtttctgaaatttcatatgatcacattaaccaaccttctgatgtcttagaagttggtcaaaaagtgcaagtgaaagtcttgagcttagaccaagaaaaaggccggatctcattatcaattaaagatacgcaacctggtccttgggatgatatcgctgataaagcaccagttggtagcactttagaaggggtcgttaaacgtttaacaacatttggcgcctttgttgaagtcttccctggggttgaaggtttagtgcatatttcacaaatctcacatcaacatatcgccacaccaaacgatgtgttagaagaaggccaaacggttcaagtcaaggtcttatcagttgatcctgaacaacaacgtttaggtttatcaatcaaagcattgcaagaaaaacctgctggtgctaaggattcagaacacgaagatgtggcgccttctgactatgtgatgccagaagaagaaacaggtttcagtatcggcgacatgcttggtaaaacattagacgataaataatttttttaaaagtcatatgcaaaaaggtagggtctgggacaaaactaggttttgtcccagaccctacgtttatgtcggtgattgattagtacgacgcagaggaagcggaagttcagcggactttgtcggagtgaccttgtcagtttggctcagacagggtacactgaacaacgaagggaatgaatacaatgacaaaaccagttatcgccattgttggtcgacctaatgtcggtaaatcgacgatttttaatcgcattgccggtgagcggatctcgattgttgaagatacgccaggggttacgcgtgatcgcatttataccacaagtgaatggttagggcatgaatttagcctaatcgataccggtgggattgaaattagtgacgcaccatttatggaacagattaaacaacaagcagaaattgcaattgatgaagcagacgtgattatcttcttagtgagtgcacgagaaggggttactgatgcggatgagcgagttgcacaaattttataccgcgctgacaaaccgatcttacttggggttaataaggcggataatccagaacaacgccaagatatttttgatttctatagtcttggctttggcgaacccatcgccgtttcaggggctcatggtcaagggttaggtgatcttttagatgccgccgttgctaagttcccagctgaagatgacgaagaagaagacgatagcatcaagtttagtttgattggccgtcccaatgttgggaagtcatcacttgtgaacgcgatgttaaaagaagaccgggtaattgtctctcaaattgaagggactacgcgggatgccatcgatacgaagttcacggctgaagataatcaagaatttaccatgattgatactgccgggatccgtaaacggggtaaggtctacgaaaatactgaaaaatacgccgtaatgcgtgcattacgtgcgattgaccgttcagacgtcgtattagtcgttttgaatgctgaagaaggtattcgtgaacaagataagaaagtggctggctacgcacatgaagctggtcgtgggattatcatcgtggttaataagtgggatacacttaaaaaagacaaccacacgatgaaagagttcgaaaatcacgtgcgcgatcaattccaatacttagactatgcgccaatcatctttgtatcggctaagaccggcgttcgcttgcaaaacttgccagcgatgattgaacaagtgagtgaaaaccaaaaccggcgcatccaatcagcactcttaaacgaagtcttgatggacgcaacaacggtgacaccaactccagctattaatgggaaacgattgcgcatttattacatgacacaagtagcggttcaaccgcctacatttgtggtcttcgtaaacgatgttaacttgcttcatttctcatatcaacgtttcttgaagaatcaattacggaaaacctttgactttactggtacaccaatccatttgatccctcgtcaacgaaaataagctgttttttcaaaaatccgctaatatgattaactaatttgctcagaatgctgttttttagcgaaattccttgctatcactaggtttgtgtgataaattaaaaaatgaaatggtgatcaaatcattgtttcgtcatttttgaccactcaaaaatggtttcggtaattaattactgattatctgtgatgagcaggaggtgaaaaacatggcaaacaaagcacaattgatcgaaggcgtagcatcaaagactggtttaactaagaaggatgcaactgctgcagttgatgcagtatttggttcaatccaagacactttgaaaaaaggtgacaaagttcaactaatcggctttggtacttttgaagtacgtgaacgtgcagctcgtaagggccgtaacccacaaactggtgcagaaattaagattcctgcaagcaaagtacctgcattcaagccaggtaaagcattaaaggattctgttaaataagaattcaatttataggctgggatttttcccagtctttttttattggcaattaatccgaatatgttaaaatggaacaatcgaaaaagggtggttaaatgacgaattcagaacaaatgcttacagcattagaagataataatttagaacaagcacagacttacttccaacaagccttagttgctgatgaacccgatacgctctacagcttagctgaagagttatatgcgatgggttttttggaacaagcaacgacaatttaccaacaattgttggcccaatttcctgaagaagatcaaatcagaacaacactagcagatattgcggtcagcgatggccaatacgacgacgccttgaacttgttggcagatattacgccagaatccaatgcgtacgccgaaagtctgctgacggcagctgatgtctatcaaacaatgggcttaccagaagttagtgaacaaaaattattgacggcgttgcgcttatatccagatgaacccgtcatgcaattcgcattagctgaattgtactttgaaatgggtgaatatgtgaaggccgccaattactatgagacgctaatcgaccaagacgttgttgaactgggacaggtgaatattcaaaagcggttggcaactagttatgccagcagtggggcttttgaagaagctttgcagatttacgaagggttgacgccagaatttctaacagaagacgatcaattccagatgggctttttgtacttacaaattaaggattatcaaaaagcaattgaaatcttaaccaagttacagacgactgatccacaatatacgtcactatatacttacttggcagcagctcaagaggctcagaatcaattagaagacgccttaacgaccgttcagaccggaattgggtacgatgcctacaacgaggtcctctatcaaaaggggagcgatctagcgcttcaattaggcaataacgaggttgctgaacagatgctaaacgaggccctcaagattgatcctgataatatgggcgaaattagtgccttgagccaagtttatcgccgtcaaggccgccatgccgaaaacattgctttcttacaagatgcgattgaaaatcataaaccaacggctgatttatattggtcattggcgcaatcacagatggcggtggatgatgttgaccaagcgcgcgaaaattatctgttagcttatcctgacttgaaagataactcggactttctacacgatttaattttattcttccaagaaatggcacaggtcccagaaatgttagcggccctcaaacaatatttgaagctcgtgccaaacgatttagagatgcaaactctctatgacgattaccaagccatgcaataatgcaaaaaaacgcccgactattactttagtcgagcgtttttttgcgtctttagtcgcgtttcttccccagatgaaagtggtacattgaagaggaatcgggaacaggatttatttggggaggtttttaggatgacaaacacaatactttcggttgcccaactaacacaagtggtgtcaattgggcagtctgaccagacgacaaccttattgaaaaatatttcgtttacggtgcaaaaaggggagttggtcagtattgttgggccttctgggtctggtaagagtacgttgttgtattgtatttcagggattacgcgacctacaggcggcactgtggcaattgcggggattaatccgtatcaattgaaacccaatcaactagcggcttttcgcagacagacgattggctttatttttcaacaatacaacttgattcagtctttacccgtctttgaaaatgttgtcttacaacagcgcttgagtcatcagcaaccgcaacgtgctgagattaaacagttactgaccaaaatgaactttgcgggacaaatcgatgggcctgttgcgactttatcgggtggtgagcaacaaaaagtcgcgattgctcgcacgattctaactgattgtgatgtgctatttgccgatgagccaacgggtgcgctagattcggcatccaaagcgattatttttacatatttcaaagagatggttgctaaagggagaacggtgattatggtgacccacgatattgagctggctagtcagacagatcgtgcgattgtattaaaagacggtcaggttcagcaaattgtgactgaaccgacacttgcgacaatctatgctgccttggatcaggtggtgtaagcgatgtggacaatcagttggttacagttaaagcattcctggcggcaatggctagcaacaataccagtttttgtaacagtgggtttaatcctcggtttttgtttaacgggaattgtgaatgtggcacagtcgcagcaagttgatctatacggtccgaatacaccgttgccgatttttatcatgccggtattttttggtggtattacaatggtaatcgtgattaaagaagtcgtgcaccagcttttggatcagtttaaaacggactatcgaatgcttgcgattctaggggcaacgatcaatgcactggccgctattttggggatttaaatcggaattgtcagtggggtgagtgctctgctcggcggagtcgttgccttgccactaacgcgtttttgttatgcgtggttgcagcagattgttgggccccaaatgttgccgaatatgccaattcatttttcgttcttggcacttttgttaacggttgtcttggttagtctaattgccggtagtggtggtttttggcatgcacgccatcaactaaaagatgggaataagcatctcagtcaccgacggcggatcgttcgtagagttaggacgattgtttcgttaatggtcgtcagtgggttaattattaaactaacgatgcaaagcatggcgttaacctatgtcggtcattccgagaaagcaattggcagtctcggcaattcggttggcaacctgaatctcgtgttgttcttattattaattctaattgcgcttaccggacacacggtattaaaattaattagccacgtgctctattggttaggtgctagaacgctctttttgaacatggcagcccatgatattgactatactgctgaaaaatatttgccgttgtatacgccagtgacggtcattgcggttttaattacggggatgtcggcaattatgtggaatataccggcctatacaaataccacgagtgccaacaatgaacgtttggtgaatttcattttgacaattggtttatatttgggcgcgccgttactgattgtattagcgaatgtattggcgacgctgttagtcgcaaaagaggataatgcccagcaaatgcgccaattacagttgctcggtttaacaaaacagcaactattgctgacacaacaatcgcatgcagtgatcttagttggtgtttgtcttgcagtcagcctactagccgggggcttagtttggagcctgacgattcatgtcgggcgaaccattttgtaccaagcacccatctcaatggcggctttgctcgctggaccgtttttaatggccgttagtatgctttgcctgctaacgatagttaatttagctcgtgtttattgtgggaaatgtttaactaaagcataaaaaagacagctagtgcatttttaagtgcattagctgtcttttttattggttttgattgcggttaagaatgtcctgcgcccacgcgcaccattctaattctgttgcgcagaccattaagcgccgtttcaaaatcaggtaacgacctaagtttttttgcttttcggtgggatcggttatgaggttgtattcttgcatcttatgttggtattgtttttgaattttttggtaatgatggcggcgatcttggagtaagtcagctgcttgttcttgattgaacagtgaaataacgtaaacttttgctaaaaactcgtcacgttgtgtgggtaaattcgtttcttcttgaaaccagtcagtaacgacgagttggccggcttctgttaaatgataaatcttcttttgtttatgaacgggatcaattttaaccgtgacatagccttgttcgtgcagtttatttaatgccgtgtagatttgactgtggtgtgcttcccaaaataaattaatgtactgctttaattcgtagccgctacacggtttgcgaactaacatacataataaaatatagctaagcgtactcatattatttcaccctttaatcgattaattattgctcagtataccatatttagagtcaacaaacatgtcactatattatgtcaaattttaatgtaaaaattgatatgttttgcaatctaatgtagtttatataaagagaaagagagtgatatgttgctggagaatcaaaataaagggctacgctcggcgtatgccgttgcatttacgtgtatggttgcatttatggggattggtttagttgatcccattttaaaaacgattgcggttaaattaaatgccacaccagcgcaaacgaccttactatttacgagttatatgttggtcacagggattattatgctatttacagggtttatttccactagaattggtgcgaaaaaaacgattagtattggtttgatcattattgttttatttgcggcgttagctggtcgttcacagaccattacgcaattaatttcgctacgggccggttggggctttgggaacgccttgttcctatcaaccgctttgactgcgattgtcagtgtgatgcctgaaaaaacggaacaagcgattatgttatacgaaggatctttaggaattgggatggccgttggaccacttgtgggtggcgtcttagggagtctttcatggcgttttccgttttatggtgtcgccattttgatgtttattgcggcgttgaccatcatggtttcattagaaccgattgctaaacctgctaaaagggcgcttttttttgcaggggctgtcgcgttaaaaaatcatcgtttacgttcaatcgggattattgcattattgtataatttcgggtttttcacgattttagcgtatgcaccattcttattagttgggttaactgaattgcaagttggttttgtctttttcgggtggggcgtgatgttagccattgcatcggttttcattgcaccacggatggaacaaaaaacgaatacccttgtgacgttgttgtttgggttaagctttttcttgatctgcttaatggtgatcggtatttatgcagatcaaccagccttagtggcctttggcgtcatcattgctggtttcttccaaggcttggtgaatacgttgttaacgacggttgcgatggaaaatgattcgattgaacgcagtgttgcatcatcggcgtatagctttattcgctttactggcggggcaatcgcaccatttgttgctggtaaaatcgctgagaaatggtcagcgcattggactttttattttgcgagcttaatgattttaattgggattttctttgttctgcgcaatcaaaaatattttgtgacggttgaagaagttgaaaaagaaattgagttaactgagggacaggaattatcataaagacacttaaaaacgccagcgattaatcgctggcgtttttattgattagtcgtacgtaaagccttccccgagtgcttcgtgcacatcaataatggaaacgaatgcgtgcgggtcatgttggttaatcaaccgtttaagataggcgatttcacttggactgacgacacagtacagcattggtcggtcttgatgggcataagcgcctgtggcctgtagaaacgtcacgccgcgttccatatcggccagaatgtcatcggcaattgcttgcgcgtggtcactgattacgagtagccctttggcggcgtaagcaccctcgagtgtgaagttcacaatccgggagaagacgtaagacgcaattaaggtatacatcatatgttcgatatcgaggtaactgagtgagagtgttaagactacgacgtcaaaaagaaggagggagcggcccattggcatccctttttctttttcgataatgcgggcaatgacgtcggtgccaccagttgtgccaccgaagcggtagataatcccactgccgaagccactacataaaccggctagaatagcggcgattaaaatatcgtggtttaaatcaattgtgatggggacacgttgccaaatccatagaaaaacggacatcatcgccgttccgtaaatcgtgtaggcgagtgcgcgtttaccgaggtaacgatagcctagaataattagcgggatatttaacaaagccgttgaatacgccgggtcgatatgcaaccaataccgtaaaatcaaggtaatcccggttaagccaccttcagccaggtgattttgaatgttgatggtcactagcccaaacgcgtagatcgcacagcccagcgcaatcaccgctaaatcacgactagtcgtttgccaagtatgttgtttcgtcatgtcaacgccccctttacataactcaaatatagcacggaatgggggttaaaaacagttggaaccactttggtggctgaagtggggtccttgattgtggtatgataaatagcatcagaaacagttaattgttagataagagggatagccatgaaagtaaccacctttgcgccggaatttgaagcggccctaccaatcttaaaacaaattgaagcggcgggttttgaagcctatttcgtcggcggcagtgtccgcgattatttattaggcttgccgattcacgacgttgatatcgcaacgtcggcgtatccagcagaagtgaagcaaatttttaaacgaacggtcgataccggaatccagcacgggactgtgatgattcttgatcatgggactggctatgaagtgaccacttttagaacggaaagtggctatcaagattttagacggcctgattcagtgacgtttgtgcggtcgttagacgaagatttacaacggcgggatttcacgattaatgcgcttgcgatgcgcgctgatggtgaaattattgatttattcgatggcctgaccgatctaaaagcgcaacaaatcagagcggtgggcaaagccgacgaacgtttccacgaagatgcactccgtatgatgcgtgccgtccgttttgaaagtcaactcggctttgcagttacaccagaaacacaaactgcgattgccaaacatgctgaactattaacgaaaattgcggtggaacgcattcatgtcgaatttgtgaagttgctacaagggattcagcggcaaaatgggttacaaacctttttaaaaaccgggttgtatcaatattgtccagcgttcgcgactgaagcagcggggctgaccaaattagcggcattaccagcgcaacagattcatgatgaagatacggcttggctactagtcaatgcattattgggtaaaacccccgccgccgccggcaaattattgaaacgctggaagagtgctaacgatgtgatcgatgcggttaaagcaggtttgggattattgccagccattctagaccaatcagccgatcagtgggccctttatcaagcggggcaacatgtattagacatcacgttaattgttgcccaattaatgaccaacgaatcagtcgcagttgatcagtggcaagcaaagtatgcggcactgcaaatcaagcaaaaggcggaactcgccatcaatggacaagtcttaatgcaaaatgggtatcaacctggtccgcaactaggaaaaatgttggcgcaactcgaaaaatccgtggtgttagatcaattaccaaacgatcaagcccaattattgcaatcggctgcacaaaactaagccattccctcagaaggtgtgttaaaataaccatgtaagcacattcagaaagggtgacaattgatgacacaacatgtttttaaggaattgaaattttattttagaaatggtgacgcttggaccgtcagccacaaagaattaaatgatatttggattagccgtgttaccaccagttatggccgcattaatggtggcccaatgcaagagattcacccttgcaagagtttcaaagccgaaatcttacctgaagcggatcatgtgaagtccgaagacatcaacaccggttctcttgaaatggggatgttcggtcgtgcaacgaagtatcaagacatcgaaaaactcgatttaatctttgaagatgatcaagatcgcgcaccaatgcaaatttatttcccattcaagaataaagataatagtggcttagataatatttatcaaagtagccaaatctcacaaaaaaatggtcggttgtacattgtgattgatgcagaacacacaattgcagatatgtaccctgaaatttaaacgttagctcctgacaatattgatcgttgtcaggggcttttttatttgtttacagtttacgacattctttttgtcattttgattgtcagtcgtctgattattcgctatgattgatggtaacgaaagtaaaaaggtgactatattgcaaacattgacagcaacgcatttaacgaagacttacggcgaaaaaacgctttttgaagacatttcatttttaatccgtgaaggggaccgcattggtttagtcggcattaatgggaccgggaaaacgacgttactcaacgcgattaccggcacggattcatacgatagcgggcaggttgaaacgcctaaccaatacgcgatgagttatttagcccagaaaccaagctttgatacgaacttaagtattatggcggcgatttttgccggcgataatccggttttcaagacgattcaaaactatgaacgcgtcttggcggcatatacgcaagatcccactaatccgaagttacagacgcaatacgaacaagctgatgcgcaaatgacgcaacaagatgcttggacggttgatacggatatcaagacgattttgacgcaattacatctaacggatttggatcaaccgattaatacattatctgggggccaacaaaaacgggttgggttggcacaagccttaattgaaagcccagacttattgattttggacgaaccaacgaaccacttggattttgattccattgaatggcttgaaaaacgcttagcacaatatcaaggcgcgcttttaattgtcacgcatgatcgctacttcttggatcgtgttgcgaaccaaatttttgaactcgacggtggtcaactctattcatataacggtaactatgaacaatttttaacccaaaaagctgatcgcttggaacgtgaacaacaagctgcccataagcaacaacaactctacaagcaagaattaacgtggatgcgcgcgggtgctaaggcacgaacaaccaagcaacaagcgcggattaatcgcttcaatgacttaaaggcgaatttaaccactggaccagacgattcggaagtcgatattcagatggggcaatcgcggttaggtaaaaaagtactcgaattaaagaacgccagtttaaaactcggcgatcgtcagattttggatgactttagtattctagttcaagcgaatgatcggattgggattagtggcgtcaacggggccggtaaatcatcactgttaaacgtgttggctgaacgcctcccacttgatagtggcgagttaattgtcggcgaaaccgtcaacctcggctactatacgcaacaaaatgaagacttagatcctaacaaacgagtgattgcatacttgcaagaagccggcgaagaagtcattggtaaaaatggggaccggatcagtgtcacacaattgttagaacaattcctattcagccgtcaaatgcacggcacattgattggcaaactttctggtggtgaaaaacgccgcttgtacttgttgaaaattttgatgcaacaaccaaacgtcttattactggatgaaccaactaacgatttagatattggcacgttgacgattctggaaaattacttggaaaactttaacgggactgtgatcacagtttcgcatgaccgttacttcctcgatcaagttgccgacaaactcttgatttttgaaggggccggcaagattagcaccgaagttggcctgttcagcgattacttggcaaaacaaaaagcaacaccaactaagtcagcgcctaaagcagcgacagcatcggttgaagaagcaccagttgcaaagaccaagcagaaattaacatacgccgaacaaaaggaatacgaacacatcgaagccgacatggaacaattggacgaacagattgaaaccatcaaagcagaaatgaacgcaaacggcgcggactatggtaaattagcagagtggcaggcccaaatggatcaacttaaccaacaactagacgaaaaaatgacccgctgggaatacttaagtgaatacgcaaactgagtgcgttcaaactggtcaggaggttctgagcatttacctagttaggcgaattagcgacgcagtcgatgatttggctaacgtagtaaagcgcaggaacctagtttgaaaagcacgttaaagaaaagaagtgcgttcaaaccggttatgttctgaggattagcctaacaaggcgaatgattgctggaagcaatcgtttgacttgtgtagctaaacgcaagaacatggtttgaaaagcacgttaaagaaaggaatccacatcatgtctgagcaaacctacttagatttagaacgtaccattttagaaacgggtcattataaagaagatcgtaccaacactggcacctatagtctgtttggctatcaaatgcgctttgatttaaacgaagggtttcctttattaaccaccaaaaaagtgccattcgggttaattaaaagtgagttattgtggtttttaaaaggtgattccaatattcgttacttactacaacacaataatcatatttgggatgaatgggcgtttgaacgttacgttcaaagtgccgattacacaggcccggatatgacagattttggtcatcgtgcccaaactgatgcggccttcaatactgtttatcgcgaccaaatgcaacagtttaacgaacggattttagacgatgaagcctttgccaaacaatatggtgaactgggcgatatctatggtaaacaatggcgtgcttggcaaacccgttctggggacacaatcgatcagattaaaaacgtgattgaacaaattaaaaccaatcccgattcacggcgcttaattgtctcagcttggaatccagaagacgtgccaagtatggtgttgccgccttgtcatacgatgttccagttctacgttaatgacggacggttatcgtgccaattgtatcaacgcagcggggatgttttccttggcgtaccatttaacattgcgagctacgcattattgacacatttgattgcgcatgaaaccggccttgaagtcggtgaattcatccatacgttgggtgatgcccatatttacagtaatcatattgaacaggtgaagacacagcttcaacgcccaattcatgccgcaccaaaattgtggctcaatccagataaaacaagcatctttgattttgatgtcgccgatattaaacttgaaaactatgaagcagaacccgcaattaaagcatccgttgcggtttaatgaggaggagcgccaatgttagcattcttatgggctgaagatcaaaatgggttaatcggtcaaaatggtcacttaccatggtcattacccaacgatcttgccaattttaaacacgaaacggttcatgaagtggtggtaatgggccggaaaacgtatgatagtttacccgtccaacccttacctggacgccaaaacattgtgattacgcgacaaccggatttagctgtggctgatggggtgtttgtgatgcacaccaaagcggaactgcttaaatatgagcaagccaacccgatgaaaaagatttttatcattggtggtgccgatatttttgcaatgtacgccgatgatgtcgattatctgtacgttacaaaaattgctgaatcgtttgaaggcaacgtttatatgccaaaattagcgatggatcagttcgaattgatcagtcaaacacctggtgtggtggacgaacgtaatcgctatgcgcatacgtttgaaatctatcaacgccgttagaaagattcaattaagggcggtcgcagcgatgtaaccgcctttttgcttgctacaaaagtgacaactggctttttttttaatcagtaacttttggtgaaaaaagcgtgattgtttgatatactgtcaatagacataatcatagaaatcacggggccgttgattgcccagatttcaagatagaaagcgtggctgaagtaatagtggctaatattaaaattgtaacggattcatccatccaactcactcctgaagaaattaaagaacatcatattacggttattccgttgacgattatgattgacaatacggtgtatatcgatggtgaaaccattacccgcgatcaatttatgactgaaatggcaagtgcgagtaccttacctaagacgagtcaacccgcaatcgggaattttgtcgaaacgtatgaacaattagcggctgatggcagccagattttatcaattcacatgctacgagcaattagtggcactgttgatacagcccgccaagccggcgagatggcgaaagcagatgtaacagttgtcgatagcgactttaccgaccgtgcaatggcattccaagtgttaaaagcggcagaagtcattgaaaacggcggtagcatggatgatgctttagcagccattcaaaacgtacacgatcatacgaagttatacatgggtgtgactgatctaaccaacctcgttaaggggggccggttgagtcatgcggctggtgtgatttcaagtttattaaatatcaaggtgatccttgaagtggctgatagcgaattaaaagtgttacgcaaaggccgggggatgaagaccattacgaaattcatcgatgaaatggaagctgatatgcgcgacttaaagattcgggcaatcgggatttcacatgcggatgggctagaattgagcgaaaaaattaaagcacaattgcaagtagtattcccaaacatcgaaattcttgtccggacaactgatccagtgattgcaacgcatgcgggtgcaggcgcatttgccgttatgtactacacagaggattaacaagattacaattaatgtattaacacactaaggctggttgacatttaattgtcccagccttaactattatctagaaataaccgaggtgtcacgtttgaagaaagcacgacagattttaattgatttaggcttatttgctggtgcgattttagtggtctttattatctggcaactattaacgccacggcccaaccaagcgcctaagacggtaacatcaacgtcttcagcggataaagtgatcaaatcaaaaccaaaaccaaaaaagacgttgcagttggttgcgattggcgattcattgacgcatggtgttggtgatgagaccaacaaagaaggctatgtgtcattagttgccaatcagattcagcaagcaaccaagcatcccgtcaagaccgccaatttcggtgtgacgggcgataccagtgtacagattactaaacgcgtgcagaaacaaaagccgctacagcagcaattggcaaaagctgatattgtgacgctaactgttgggggcaacgacctaatggcagttttacagaataatttttttgagctgaatcaacgtcggattacgactggtcagcaaaaatatcaagcgaatttaaccacgctgatgatgcaaattagaaaatataatcctgatgccccaattttcatcatgggggtctacaatccgttttatgtctatttccctgaaatcactgggatgtcaaaggcggttgctgagtggaatcagaccgccaaaacggttgctaatgatttcaaagatacgtattatgtcaatagtgatcggatgttgacacggggcgatgggcattttgtcaaacagactaaatcgctcgctaaaatggatagtgcacagttgcaaaaaacattagcggctaacgagcatttgaacccctataccagtccagatgatcatttccatcccaatcataaaggttatcaatgggtcacaaaggccttttggcaagtgatgaaagcacacaagcaaacgtgggattagagaaaggataggttatgacaaccagacaagcacatcaagcagcacagaaaacaacaactaaacggaccatcaattattggaaatacagtttcatcgtcttattagcagtcgtgatcgggacagttggtcttgtcggctacaacgtgacagcccctaagactgaaatgattaaaactgagaaaatcatcaaagctgatagcacttttgaaattcagatgcataagagacaaatcaatagtttagtcacctattatttacaaaactacttggaagattcaaagattaaataccaactcaccctggatcagcaggcgattttatctggtcaattcaagttcttagggtttccggtcgaattcaacctcttttttgaaccgtacgttttagaaaatggcgacgtccaattacgcgccaaacaattagcagtcggacaattgaaggtgcccatgtcgtttgtctttaattacatcaagcgtcaatacaaattccccaaatgggttattttggatgcacacaagagccggattacattacgcctaaatgagttcaagctcgaaaacgggatgcaagtaactgctaaacatatcgatttgaagaatgataagattgatttaaacgtctatatcccgctaaaaaataagaaataaggtgttcagatgaagcagagtttttatcgttacctcatgacccaacgtgatccgaataattatgaaccagttccccaatttgccaacaatgccttttttgaccaatctttccctaaacaaagcggcgattatgaaacattaacgcgctatttggaacttaatggcagctacctcccgagtatgacgatttttgatgaggcgtatgaagcctatcaggaaagcgaacaagcctaatgacttccccgaagcagaaattgtggcggggatgggccattaccggctattggcttctcgcatttttactggctgggacggtagcgattgtgttacggtcgttcattctggtccccgcatcggtgtcagggcaatcgatggccccgacgcttgagtcagcggaccaactcttattacgcactagtgggcccatcaagcgctttgatgttgttgtcttcacccgagctgatcaaacaacttatgtgaaacgggtgattggtctgccaggtgaaaccgttgcataccgcaatgaccagctgtacatcaatggacggcatgtcgacgaaccattcttgaatcaggccaaaaagaaaccagggattttaacatcagattttgaattaaaaaccttaatcggcgaaaaacagattccaaaagatgagtactttgtattgggtgacaatcgccagattagcaaagatagccgtttgtttggtacgatccaccgcgatacaatattaggccgagcagtggcggtctactggccgattaaagatatacaatctttaaaataataattaaaagctgacatactctagagtgtgtcagcttttttgattatcgagtgctaatgatcgtatgaaatgtactgaatatgatgcttaactgaaaaaatgatacgcttaattggtggatgttgtagtccggaattaaatttaacccgtcagccagacatcaggtatgatagaattaagaataatacaatcagtgacaaatattaagaatgatgtatatcgcttaactagcaataaaggagttattatgacaattcaatggtatccaggccatatggcaaaggcccaaaaacaaattaaagaacggctcaaagcagtcgatttgattctcgaaattgtggatgcacgggttccagaatcttccattaatccgatgattgcagaacttggtcaaaacaaaccgacgctcttgattatgaacaaagcggatatggcagatgccaaacgcacacaacaatggattgaaacatttaaaaaacgggggattacagcaatcgcgcttgatgcgcaacataaatcaaaattaccgcaaatcgaaaaagtagcacaagaaattttggcagacaaacttgctaaaaaacgggcaaaagggattcttaatccggtgatccgtgcaatgtgtgttggggttcctaacgttggtaaatcaacgattttgaatcgcttggtgcaaaaaaacattgcggtaacaggtaatcgacccggtgtaaccaagaatcaacaatggttaaaagcgggccaatcactcgaattgttagatacaccaggggttttatggcctaaattcgaagatccagctgtcggcaataagttggccttaactggtgcgatttcggatgcaatttatcacccggatgatgttgtggtgtatgccctcgattatttcaaggatttctatccgcaacaattggtaaaagaataccatgtgacgccggctgaacttgaaatgccagcgcctgatttaatcatggcattgaccaaacgactaggttttaaagaagactacgatcgcttctgtatgaaattcatcacggacgcgcgtaagggtaagttagggcgctttacactcgatatcgttcctgtggaggcgcactaatgaccaaaccagaatcaattgctgccattaaggcacgcttattagacgacatttcagaggaagaagtggcgctcttacgcagtgatgcgcgtgctggcgtgcagaagttactcgttcaatatgacaagcggatggctaagttagcggcgcaaaaagcggcgtttatcgaacgacgccagctagaagaaagtttatggccagattatcccttgattgctggaattgatgaagttgggcgcggcccattagcgggtccagttgtgacagcggccgtcattttgccacatgattttgacctatggcaagtcaacgactctaaacagctttcgtttaaggtgaaacaagaactgtatcgcggtatcatggcacaagccatcagtgtcagcattgggattgccgatgcaccacggatcgaccaagagaatatctatcacgctacggaactggcgatgggcgaagctgtcgctagtttagcagaacaccccgattacctattggtggacgcaatgaccgtgccgacagacatcccacaagaaaaattgattaagggggatgcgcgcagtattagtatcgcctcagccagtattgtggctaaagtgattcgggatcaattgatgattaattatgatcaacagtatccgggttacgatcttgctaataatatgggttacgggacagcgaaacatctcgctggtttagctgaattcggtgttacgccaattcaccgccgcagtttttcgcccgttaaagacgccctatagaaaataaaacagctcctttacgaagataaacgtaaaggagctgtttttttgtgttgactaaaaagcaattattattgaaagtacacctggcagatgggtttggccccatcagtgaattacgcttagccgcatggttagtaacgagtcacaattgggctttatcggcattggagattgcgcagattgcgtgtttaccggagcgatattggctgacctttcagactagttttgacagtctagctctgcaacagaagtgtgccacgcatgaacgttatgttcagtatctgacgattctagaagcagattatccgcaacggttgttagaaacccattgtccgccaacagttttattttatcgcggcgatttaagtgttttgaaacagccatgtgttgcggtggttggtgcgcggcaagccacggagtatactaagcaagccctgcagcatttattgggattaccacaaacaacgacgattatcagtggtttagctcaaggggcggatgcgatggcgcatgaagttgcactccaaaaagggttacgaccgattggcgtgattggaacgggcttgaattgttattacccaccacaaaacgaacacttgcaacaggcggtcgctgaaaaagggttattgatatcagaatacggtttggacgtaacggctaagaagcaccacttcccagcccgaaatcggattattgccggactttgtcatagtttagtggtcacagaagcccgccaaaaaagtggtagcttaatcaccgctaatttagcattacaagccaatcgtaacgtatatgccttaccgggccaggttaatcattcattatcggcaggctgtaatcaactgattttagccggtgcaacgccgcttttaaatcaacaattgttattggacgagttgcattattttgattgagggttaattgttgacaattctgcggcatgttgttaatattaaagtcacaagttacttataaagtaacaaatggaattcaaaggggatttttaatatgaaatatgcaattacagcagtgacaggtcgttttgggcaagtcgcaatgaagacgttggctgacttagtgccagcagaacaaatcattggattagcacggaatactgaaaaagccactaaaatggtcccagctggtgtgaccgttcgtcccggtgactataacgatgttgccacattaacggaatcactcaaaggcgttgaccggttattattcatctcctcacaacctggtggcgatgtgccccgtgcgcaacaacatttaaccgtgattgaagctgctaaaaaggctggcgttaagtggattgcttatacgagtttcccacacgctgatcaagcaacaggtgctttagcaagtgatcacattcaaactgaaaaagcattggcagcatcaggcattgatcatacattcttacgcaataactggtatcttgaaaacgaaatggatagcattaaaggcgcattagcaggtcaaccatttgtttatggcgctggtgaagggcatgttggttgggcactcgaacacgactatgctgaagctgcggctaaggtattagtcaacgatcaaccaaaagcgatttatgaatttgccggtgcgccagccacttatgcggatttagctcaagcgattagcgagttgactaatcaagaatttaaggtagtatcattagatgcggctgattatcgtcaaagcctcgaagacaacggcttacctgctgaagtcgctgaaattgtcactggtattcaaacaatgattcaagatggtgatttagatgaaaccatttctgatttacccgatgtcttaggccgaccattaccttcattaaaagaagcgttacagacgattattaaataagcctgaattgatttcaaaaaggcggttgaaccatgaaatattctcataaacttagtgatgccatccatattttggcctatgtcgatatttttcaagatggtgatttatcaagccaagcgattgctgggagcatcgagtctaatcctagtttagtgcggcggctaatgtcactactggtgaaggcggatttattagcgactaaaccggggacgattgcccctaaattagcgcgcccagcggaacagattacaatgttagccgtttttcaggcgcttgatacagatcaacggttattacacgttgatgaaaaaacaaatccagattgtttaattggtagcaacattcaagcaacccttgatgcggcttatgatcaggtgcaaaaagctgcggaagcggagatggcaaccgtcacccttgatcaaattattgcggggattcttgaacgcgatgcacaaaaaaatagtttgtcagtctaagttttttatctggcgactatataatagaagaaatcggggttcgaccaagtggttgaaccccgatttttggtgtgatttgtacgtttgaaaacaatttctctttggcatactgccaaacctatgctatgctttaagctgttaatatcaagcatactatcagttgacaatcgtcaaggtagtgttttatgctaatgaacgatttgaacaaagcgttctgttgaaaggggtttgtccatggcaggcaaaaatttagtcattgtagaatcacctgcaaaggccaaaacaattgaaaagtaccttgggcgcaactataaggttgttgcaagcaagggtcacatccgcgatttaccaaagagtcaaatgggtgttgattttgaaaataattatgaacctaaatatatctcgattcgcggtaaaggcgaaacgattaaagaattaaaaaagcaagctaaaaaagttgatcatatctatctcgcagccgatccggatcgcgaaggcgaagcgattgcatggcatgtttcccatattttaaaactcgatccaactgaaaaaaaccgggttgtctttaacgaaattaccaaagacaccgttaaaagtgcttttaaaaatccacgtagtatcgatatgaaactcgttgatgcacaacaagcgcgacgcgtgcttgatcggattgtcgggtattcaatcagtccattactctggcaaaaggttaaaaaaggcttgagtgctggtcgggttcaatccgttgcgttaaaactcgtgattgatcgtgaaaacgagattaaagcctttgttccagaagaatactggtcattggatgcggaatttaaaaagagtcgcagtaagtttaacgccagtttctacggcgtgaagggtaagaaattaccccttagcgataatgatgcggttcaagcgattttgaaacaaatcgataagactaaggatttcacgattgaagatgttaagaaacgggaacgcaaacgttttgcagccgcaccatttacaacgagttccttgcaacaagaagccaaccgtaagttgaacttcagaacgcggaaaacaatgatgcaagcccaacaattgtatgaagggattaaccttggtggcaaagaaggcacggtcgggttaatcacttatatgcgtaccgattcaacccggatttctaccggtgctaaacatgaagcgtcacaattcatccatgacaattatggtgaagaatatgcggcattaaaggcgcataagacgaagaatcctgaaggtgcacaagatgcccatgaagcgattcgcccaacgtcagtgatgcggacacctaagagcttgaaagacgttttaactaacgatcaatataaaatctataacttaatctggtcacggtttgtcgccagtcagatgacaccagccatttttgatacggtcgcagttaagattgctcaaggtgatgtcttattcaaggcaaacggctcacaaatgaagttcccaggattcacgaaactctatgtgtcatcacgtgatactgaagactctgctaaggataatgtcttaccagaacttgcagttggggatgcggtgaaactcgttagaactgatccagtgcaacattttacgcagccaccagcacgttattctgaagccaatttagttaaggctttggaagaaaacggtgttggtcgaccatcaacgtattcaccaacgatcgaaacgattcaacggcgttattacgtgaagttaaacgcaaaacgctttgaaccaactgagttaggggaaatcgtcaatggtttaattgtcgaattcttcccggacatcgttaacatcgactttacggccgatttggaacatcgtttggatgaagtcgaaacgggtaaagaagactgggtcaaggtgattgacaacttcttcaaaccgtttgaaaaagaagtcgaaaaagcgagtgaacaaatcgaaaaagtacaaattaaagatgaaccagctggctttgactgcgacatctgtggtgccccaatggttgttaaaatgggtcgttatggtaaattcttcgcttgcagtcgcttcccagattgtcgcaataccaaggcaatcgtgaaggaaatcggcgtcacctgtcccaaatgtggtaaggggcaagtcatcgaacgtaaatcgaagaagaatcgcttattctacggttgtgatcgttacccagattgtgattttatcacatgggataaacccgtcggcagaaactgtccgaagtgtgaacactaccttgttgaaaagaaaattaaaggtggcaaacaagtaatttgtccaaacggtgactacgaagaaaccgtccaaaaataattagaaaaatggagactagcaaatgagcacagaaccttttgtaaacgtgattggtgccggattagccggttcagaagcagcatggcaaattgcccaacgcggtgtgaatgtgcacctctatgaaatgcgtcccgttaaaatgacaccggcgcaccatacagaacaattcgcagaattagtgtgtacgaattcgctccgtgcgaaccaaattaccaatgcggttggcttaattaaagaagaaatgcgtcacttggactcattaatcatcagtgcggctgatcaaaatgccgttcctgctggtggcgcattggccgttgaccgcacaccgttttcacaaacggtgacggatcgcttagccaatcatgaacgtgtcacagttcatcatgaagaattaaccgattttccagaaggtcctacgattgtggccactggtccattaacgtccgaaggcttagctgaaaaaatcagtgccttaaacggcagtgatggcttgtatttctacgatgctgcagcgcccattttggataagaacagtatcgatttcgataaagtttacctcaaatcacggtatgataagggcgaagctgcttacttaaactgtccaatgactgaagaagaattcgaaaacttctacaaagccttgattagcgctgaagttgcagaaatgcatgactttgaagaagaaaagttctttgatggctgtatgccaatcgaagtgatggccaaacgcgggattaagacgatgttattcgggcctttgaaacccgttggattggaagatccgaatactggcaaacaaccatacgccgttgtgcaattgcgccaagacaatgcggctgctagtttgtacaacattgttggtttccaaacacatttgaagtggggcgaacaaaaacgggttttccgcatgattcctggtttggaaaatgctgaatttgtgcggtatggtgtgatgcatcgcaatactttcatgaaatcaccagatgttttattaccaacctatcaatcaaaacaacgtgacgatctattcttcgctggtcaaatgactggggttgaaggctacgttgaaagtgccgcttctggactagtggctgggattaacgccgctaaactggcgttggaccaaacaccggctgttttcccaacggatacggcgatgggatcaatggcgcactatattacccatacgagtgccaaacatttccaaccgatgaatgcgaactttgggattttcgaacctttgaaacaacggattcgcgataaaaaggaacggaaccaagcacttgctgatcgcgcacttgaaagtatcgaccaatttaagacgacactttaattagaatcttttaaatcccgccaggcttgtggtaaagtaatactaatcaagcttggagggatttttttggcgttagaacaagaatggcttaatctttttttacagtacttagtggtcgatcggcattactcgccagaaacccaaaaagcttatcaagctgatattcagatgttcagtgcttttttaaccgctaacggcggcttagcgtcgtttaaacaggtcacgccactggacgtgcagacttacttgaatgaaatggatcaaaaagaatatagtcgtgaaactgtcgcgcggcgaatttcgagtttgcggtcgttttaccggtatttagtgaaaaatgagttcgtgcaaaccgatccttttgaagctgttcaattaaaaaagcaacagcataagctgccgcggtttttttacgaaaaggaaatggacgcgctatttgctgccattgatggggatcaaccactcgatcaacggaatcgcgccatcttagaattactgtatgcgacggggatgcgggtgagtgagtgcgcgcagttgacggtagcacaaattgatttcggcttacgcgtcattcttgttcatggaaagggcaataaagatcgctatgtaccattcgggcaccatgctgaacgtgccttgcaagcttatttaaaagttggtcgtgttcaattgatggccaaaaaacaattggaccacgatgtcgtttttgttaatcatctcggagcgccaattacaagtcggggaattgaatacattttagatcagattatcaagaaaacaagtttaacgagtgacattcatccgcatatgattcggcatacctttgcaactcacttattggatcacggtgctgatctgcgaacggtgcaggaattattaggccacagtagtttatcaaccacacagatttacacccatgtcaccacagcccatttacaaaaagattaccgccaattctttccccgcgcgtaaaactcggactaaagtttgatttttttcaacgaaaaatagactaatattagcacacagtcttaaagactgctaaaatagaagtgcgttcaaaccggttatgttctgagaattagcctaacaaggcgaatgattactggaagcaattgtttgacttgtgtagctaaacgcaagaacatggtttgaaaagcacgttaagaaagaagtgcgtcatcaacgggttgtttttgagcatttgcctaatcaggcggattaccggcaacgccggtgatatgacagatgtagcaaagcgtagaaagcagttgatgaaagcacgttaagaaaaaagtaagtgcgttcaagcttgttcaacttttgagcactagcacagggaagcgaattagcgataaagtcgctgatttgattcacagcgctaagcgcagaaagttagtttgaaaagcacgttaagccccgcccaatccccaaacaacgttaggagtaattcatatgacaacaatttgtgcagttaaacataatggtaaaacagctatcgccggtgacggtcaagtcaccatgggcgaaaaatttgtgacgaaggattctgctaaaaaggtccgtcgaatttatggtaatcaagtcgcaatcggctttgctggtggtgttgcagatgcctttacgctacaagaatggtttgaacaaaaattagaaaagtattcaggcgacctgcaacatgctgctgttgctttagcgcaagactggcgtaaagatccaacgcttcaaaaattagaagcgatgttgattgcggtcaatgcaactgatattttattaatttcagggaatggtgaagtcatcacccctgatacgctatcggaatcaggtgatcaagtgattgccgtgggttcaggcggcaatttcgcccaagcagcagctaccgcattattacttgaaggaaaagatgacttatccgttgaaaaaatcgtcacaaccagtgttgatattgctggtggaatcgatgtttacaccaaccacaacgtgattgtcgaatcattttaggaggtcgcacaatggacttaatgaataaaacacccaaaacaatcgttgccgaacttgatcaatttgtcattggccaagatcaagctaaaaaagccgttgcggttgcactatacaaccgttatcgccggatgcaactcagtgcaaaaatgcaacaagaaatcacgcctaaaaatctattaatgatcgggccaactggggtcgggaaaacagaaattgcccgacggttagcgaaagttgtcgatgccccatttatcaaggttgaagccactaaatttaccgaagtggggtatgtgggacgtgacgttgaatcaatggtccgcgacttagctgatgtggctgtgcatatggaagaaacagaacaatttaaaaacgttcgtgctaaggctgctcgtcaagcagacaagcgcttggttaaactactagtaccgggcattaaaaaggaacaacgtaagaacaataacaacatgaatgatttaatgaacatgtttaacgcgcttcaaaaaggggaaacaccagctggtttcggacaaactgaatcagaagaagtgacggatgatatccgtaacgaacggttatctgttaaagaacagttagataaaggcttgttagatgaccgggaaatcgaaattcaagttgatgaaccgaaaaaagttgccccaatgaacgatatgatgggccagatgggaattgatttaaacgatactctgggttcaattatgccgaagaaaaaaattacgcggacggtaacggttaaagaagcgcgtgaagttttcattcaagaagaatccgctaaattagtcaaccatgccgatatttaccatgatgcgctccaacgtgctgaaaataccgggattatttttatcgatgaaattgataaaattacggctggtggcaaaaaacaatctggtgaagtctctcgtgaaggggttcaacgtgatattttaccaatcgttgaaggctcacaagtcaatacgaaatacggtgttttgaagaccgaccatatcttatttatcggttcaggggcgtttgctgaatcaaaacccagcgatttaatcgctgaattacaaggacggttcccaatccgggttgaacttgaagatttaactgaaaaagacttcatccgaattttaacggaaccaaacaacgcacttgtaaaacaatacatggcgttgattggcgccgatggggtgcacgtcaccttcacgatggaagcaattggccgcattgctgcgattgccttccaagttaaccatgataccgataatattggtgcgcgtcgtttggccaccatcttagagaagctattagaggatattctctttgaaggtcctgacatgcagatgggggatatcaccatcacagaacaatatgtcaacgataagatcggtaatattgcagccgataaagatttaacccgctttattctataatttttaaaaggtggtattttaagatgatccaaattgcaaacgaatttttaacggtgaccctcagtccaaaaggcgccgaattacaaagtattaagggcgccgtttcggggcttgaatatttatggcaagctgatcccgatgtttggggccggcacgcacccgttttattcccattcgtggggcgttcaaaagcagaccaatatacgtataatggccaaacctatccgatgggtcaacacggttttgcacgtgatcgcgaattcagtatcgaagaacaatcggaccacgccgtgactttcttgttgaaagcagacgctgacagccgggccgtgtatccatttgaatttgaattacgtgtgagctatcgtgttcatgatatgcatttgacggttggctatgacgtccgcaatgttgcgccaagcgggccaatgtacttctcaattgggggtcatccaggatttaaagtcccattaacggatgacacgcaatttgaagattatttcttagactaccgcccacaaaaatcacgggttaagatcccattgcaaggggccttcattaatttgaacgaccggacgttagcaccaaccgacgtcgcaacggatatcaatcaccaattatttaaaaatgacgccttaatctacgaattaaagggtcaagccaatgaattcagtattcgttctgaaaaaacggaccactcagtgaccatgaaattggctggcgccccattcattggtgtttggtcaccttatccaacagaaggcaaccttgtgtgccttgaaccttggtgggggattgcggataccgttgacgcaagcggtgaactttcagaaaaatttggtgtcaacgaactggctgcaggtgaaacgtttaatgcaagttatgaaattactgttcgttaatgaatgattaaaaaaacgcacttaccaagatggtgagtgcgtttttttagtaaactggctgtaggcgggtaacgcattctaaacgcactctgctagtttttccagtagttccatgctaagatataagttataaaatcataggttaggtagggtaagtcatgactgaagaaaagaagtattacggcgcggatgccatcatcgatagtttagtaaatcatgatgttgagtacgtgttcgggattccgggtgcgaagattgatcgggtttttgaacgactagaacatcccgttaatccaaagacgcccaaattaattttgacgcgccatgaacaaaatgcagccttcatggcggctgggattggtcggattacgggcaaaccaggcgttgtaatggcgacttcaggccctggtgccagtaatttagcgacgggggtcgtgacagcaacggcagaaggtgatccagtcttagccattgccggtcaagtgaaacgcgctgatttgttgcgactaacgcatcaaagcatgcgtaatgccgctttattcgcaccaatcacaaaattcagtgcggaagtccaagaacctgagaatttatcagaagtgattgctaacgcctatcaagaagctgaatccgctaaacagggcgcaacgtttgtcagcatcccacaagatgtcacggactcagaagttcattctaaagtgattaaaccgctaatggcgcctaaattagggccagccagtcccgttgaaacgacgcttttggcacaacggattaaagaagcaaaattaccagtacttttagttggtatgcgcgcttcttcaccagaagtgacagcagcgattcgcaatttagtggctgaaacccacattccggtcgttgaaacgttccaagcagccggtgtcatttcgcgtgatttagagactgatttttatgggcgagttggtttattccggaatcaaccaggcgaccgcattctaaaacgcagtgatcttgttattgcagtcggctatgatccaatcgaatatgaaccgcgtaactggaacgctgaaagtgatgcgcacattatggtgattgatgatatgcgcactgaaatcgatcataatttccaacctgaaaaagaattggtcggcgatattgcgcagaccctagactttttattaccttatatgaaggggtatcaactagcgggcgatgtgcgtgattatttagttgaattgcacgcagaactcaatcaacgtgacacggcacctgaaatgacgaccgataatccacttagtcatccgttgaacattatttcagaactgcaagcacgggtcaccgacgaaatgaccgtcacggtcgatgttggtagtcattacatctggatggcgcggcattttagaagttacgaaccacggcacttgctctttagtaacgggatgcagaccttaggtgtggcattgccatgggcgatcagtgctgctctagtgcggccaaatacacaaattgtgtcggtttcgggagatggtggcttcttattctcaggtcaagacttagaaactgcggtgcgtctgaacttaaacatcgtgcatattatttggaatgacggttattatgacatggtaaaattccaagaagaaatgaaatatggcgaatcagcggccgttaagtttggtcccgttgattttgtccaatatgcagagagttttggtgcaaccgggttacgggtcgaaaaagccgcagatcttggtaaagtattggatcaagcctttgccattgatggtcccgtccttgtagatgtgcccgttgattacaaagataatcaattattaggccaagcattattacctgaccaactcgtttaatttgaggaggaaaatcaatgacaaatgatgtcaaacgcgtttatcaacacggaacgttagccctattaattccggggctctttacagggacaatgaccgttgctgaattattaacccatgggaattttggaatcgggacggcgcacggtttagctggcgaactggtcttattagatggccatgcttatactgtgaatggggatggccaagtgactgaactcgcacctgatgcgacagttccatttgcgacagtgcattggcaagattcatcattacctacacaagcggttcatcaacgcacaaaggctgagttagaaacgcaaattctagcgcaagcaccgttaaaaaacttgttttttgcggttaaaatgactgggactttcaaagtcatgcatacgcgggccgtccaaacacaacaggaaccttatccgaatttgactgctgcaacccgagtgcaaccggagtttgaacaaacagacgtaacgggcacgttgattgggtattatgcaccagcgctttatcaaggcgcagctgttgcaggctatcacgtacacttcttaaacgatacgcacgactttggcggtcatattctagactataccgtggtcgatgctcaaatgacgctccaaccgtttgaaacgtttgaacagcacttcccaagtgataacgaagcttttttaaagagtgactttgacttacaacaagtcaatgccgatattgaagaagcagaacactaaacattcaaaaagcccacggaaaaatccgtgggcttttttgtattttaagcatggtggttaattggaccgtacttgtggccgacttcaatcgggttagcgatggcgcggtgaacaaattgtttagcggtcttaatggcagcctcaattgtctgtcccttagcgatttcagcacagatgcaagctgaaagtgaatcgcccgtcccattaatatgggtggtttcaacgtaaggttctgatagccaaaattcttgtccatcggcaaggcaaacgtagtctgtaacgattgattgtccggcctcgtgatggcctttaatcatgacgttttttgcgtccattgccaatagtgcttggccagcagcttggaaatcagcaggtgtcttcagttcaataccagttaatttttgcgcttcgtagaaattaggcgttaggacagttgcaaggggcattaattctgtctttagtgtgttaaaagcatcatctgccaacaacaatgcttcatgcttggtaataatgaccggatctaacactaggggaccaaagtcatgttttttcaactgattagcaacggttagaatggtctcacggtcggttaacattcctgttttgcaagcgcgaacctgaaagtcggctgcaattgcttcaaactcggcatcaataaagtcgggagacagtgcttggctagcacgaatcccatatgaatttccagcaacacaggctgtcaaaatgctcataccataaacattacgggcaaaaaaagtatttaaatctgcttgtgcaccggcactgccatcagaatcggaaccggcaattgtcatgacttgcggaaagctatttaacattatcaacatctcttttccagagcggacggaacgtccatcacttaatatatcctaatattagtataagcttttaggtgtccttttttcaatcagcagaagacactaattaagtgaatttcgtgtatactatgaattaaataattgtcaggagggacttatgattcaattaaaaatcgaacgattatcttatcaggttgatcaacaagtgattttaaccgacattaatttaaccgttgaaaaaggcagttacttaacgattacaggaccttctgggggtggtaagagtaccttgttacggttaattgcggacttactaacgccgacaagtggcaccattttattaaatgatcagccactgacccagtttagtcccaatcagtatcgacaaaaggtttcgtattgttttcaacaagcaacgttatttggtgaaacaatcggggataatttacgttttccatacgagattcgtaatttaccggtcgatatggcaacaattgaaaaagcgttggcagcggttgggttagccaacatgccactaacgaaaaaaattaccacgttatcgggcggtgaaaagcaacgaattgccttgattcgtaatgttttatttccaccggaagttttattacttgatgaaattacgactggtttagatgccgctaataaggcaattgtattggcgtttgtccagcacctcaatgaggattgcgggctcacaattattgccattacccacgatacagaagaattacaacggaaagggcgccaggtgcaaattgttgctggcgaattggtaaatcaagatgaacttagccgttaatggtctttcactgacgtttgctgtgacattagtgtttgtcgcattagtcattagcttccatgaaaaaatcggtcttgaaaaagatatgattatcagtgtttttcgcgcaatcattcaattatttatcgttggttatttactgaaattcatttttcatattaacgatgtgtggctaacgttattgatgatgctgatcattatttttaacgccgcagcaaatgccaaaaagcgggcggggaaactacgcaacgggtttccaatttcatttatcgcaattttaacaagtactggggtcacgttaggattacttgttttatctggggcgattaagtttattccatcgcaaattattccaattactgggatgattgcttccaactcgatggtcgccattggcttgagttaccgcagcttactggcgcaatttaaggatgaacggcaacctgttttggaacgactcgccttgggagcgaccgctaaacaagcatcaattgccattattcgtgagagtattcgtacggggatgtcacccacgatcgattccgctaaaacgatggggcttgtcagcctgccagggatgatgtcgggcctgatttttgccggaattgatccagtcaaggccattatgtaccagatattagtgacctttatgttattatcggcaacgagtcttggttcagtgattgcgtgttacttagcttatcgatcattttacaatgaacgggaacaattgattgatctttaactgattgcacaaaaaaacgcccgttcggcgtttttttagttattgatgtttttgtttatagcgatagtacaggccaaatggcactaagttttcagtgccatttttaatgcgttgtagattttcgcggtgccggtagaccaggaaaagtaagaccaaggtcgcaatcgaaccgagtagccaatcatgcgtgtaaaacgataaaatcgcaatcatcaatggaccgaggatgctagccatgctaaccatacttgtaatcaggatgacactgataaagatggtactggcaattacgaagaaaagtggattgtatgccagtaagatgcctgcgctggttgcaacggcttttccccccgtaaagtgtaaaaagatggagtaagcatgaccgacaacggccgctaagccgacgattaagaccaatgcatgattggggatgtgaaaaatcatcggtaggctagcagcaagtgtgccttttaaaatatcaagaaataaaacggctgtcccagcgattgggccgagcacgcgatacgagttagttgtgccgatattatggcttccagcatctcggggatctttgtgacagaaaacgcggccgataataacgcctgatgggaacgaaccgatcaggtacgcaagaataaagataagactaagtttcatgacaaaaactcctatttgtggcatttgtttcccctattttagcattttgacaagggaaaaggaatattgtatgttagaataggtgaatacgaacatacatttgtattggcaagaaattttaaatttttgattgtaaaatcatccaaacttgttgataatataccttatctgttcatttttaaacaaaggagtcatacttgaatgccaaatcaaaaacaagattataatgataattcgattcaggtcttagaaggtctagaagcagttcgaaaacggcctggcatgtacattggctcaactgacggtcgcggcttgcaccatttggtgtacgaaattgtcgataacgctgtcgatgaagccttggctggttttggttcagaaatcaacgtcgtaattggcgcggataatagtattagtgtccgtgatcatggtcgtgggatgccgactgggatgcaccaatctgggattcctacgattgaagttattttgacagtgcttcacgcaggtgggaaatttacccaaaacagttataaaacatccggcggtttgcatggggttggcgcgagtgtcgtcaatgccttatccgaatggttgaccgtccgcgttgtgcgtgatggtgttgcctacgaagaacgctttgaaaatgggggccacccggttggtaccttgaaaaaagttggcaaagctaaagaaccaaacggcacgttaattacgtttaagccagatgggacaatttttcaaacgactacttataactacaataccttagcagaacgattacgcgaatctgcctttttactcaaagatgtcaagattacgttgaccgatttacgcgctgagccagcacgtcaagatgtcttccattacccagaagggattcaatcatttgtcgattatttgaacgaagataaagatacgattggtaataagttatatttcgaaggcaccaaagaagacattgaagtcgaatttgcgggtcaatataacgatggctactccgaaaacatcatgtcatttgtgaataatgtccggacaggtgatggtgggacccatgaagctgggatgaaagccggcttaaccaaagcttttaacgattacgcccgcaaggtaaacttgctcaaagaacgggataaaaacatggaaggctccgacgtacgtgaaggtcttagtgccgtcttgtctgtccggattccagaagaactcttgcaatttgaagggcaaaccaagggtaagctaggctcgccacaagcgcggacagctgtcgatagtttggtttatgaacaaatgagctttttcttacttgaaaatggtgaatttgcgcaagccttagtgcgtaaatcattaaaagcacgcgaagcacgtgaagctgcgcgtaaagcacgtgaacaaagtcgaaatggtaagaaaaagaagaaatccgatggcttattatctgggaagctaacaccagcgcaatcgaaaaatgcggcgaagaatgaattgtacttggtcgaaggggattctgctgggggttctgctaagcaagggcgcgatcggaaattccaagcgattttgccattgcggggcaaagttttaaatacccaaaaagcgaaattacaagaaattctaaaaaatgaagaaatcaacacgatgatttacacgattggggccggagtcggggctgaattcaaacttgaagacagcaattacgataaagtcatcatcatgaccgatgcggataccgatggggcccatattcaaattttgttgttaaccttcttctaccgctatatgcggccgttaattgaagccggaaaagtctacattgccttgccaccattgtataagctccaaaaaggtgctggggcaaaaacgaagattgcctatgcttggactgatgatgaattgaaagtcgtcgctaaagaaatgggtaaaggctacagtcaacaacgtttcaaagggttgggtgaaatgaatgctgatcaactttgggataccacaatggatccaacgagtcggacgttaattcgggtgcggattgatgatgcagccttagctgaacgccgcgtcacaacgttgatgggcgataaagttgaaccacgtcggaagtggattgaagaaaacgttaagttcacaatggctgaagatggtagcatcttagatacaacgaatggtcaaccagcaccgacaacttcaagcgctgaagtggatttatttgaccaattagacgaatagaaaagtgagtgattaaatttggctgatgaagcacaaaaaattcaagagctaacgcttgaagaagtcatgggcgaccgctttggccgctattcaaaatacatcattcaagagcgggcgttaccagatattcgcgatgggttaaaacccgttcaacggcgaattttatacgcaatgtccatcgatgggaatacttatgataaagggttccggaagtcagcgaagtctgtcgggaatgtcatggggaatttccatccgcatggggatagttcaatttatgaagcgatggtccggttaagtcaggactggaaattacgtgaaccactgattgaaatgcatgggaataatgggtcaatggatggggatccaccagcagcaatgcggtatactgaggcacgcttaagtaagattgctggtgaaatgctcaaggacatcgataaaaagacggttgatttcgttttaaacttcgatgataccgctgaagaacccactgttttaccagctcggttcccaaacctcttagtgaatggggcaactgggatttcagctgggtacgcgactgaaattccgccacataatttaggtgaagtgactgatggcttggtctatctattggatcatcccgatgcaacgttagaaaaaatgatgaccttcatcaaaggacctgatttcccaactggtgggatcttacaaggggtcgatgggattaagaaagcctatgaaactggtcgcggtcgagttgtcgtccgggcaaaaaccagcatccaacaattacgcggcaatcgggaacaaatcgtgattagcgaaattccttatgaagtcaacaaggctatgatggtcaagaagattgatgaattacgcgttttaaagaaggtcgatgggattgctgaagtacgagatgaaagtgatcggatgggcttatcagtcgttgttgaattgaaaaagcaagcggatagtcaagggatcttgaattatctgttcaaaaatacggatctgcaaatcacatataactttaatatggtcgccatctcgcatatgcaacctaaacaggttggcttattagaaatcctccatgcctacttggaacatcaagaagaagtcgtgattcggcggacaaaatataccttacaaaaggcattggatcgtcagcacattgtcgcagggctaatcaaggcgctctcgattttagatcaagtgattgcgacgattcgtggtagcaagaataaaaaagacgctaaagataatttagtggcaagctacgccttcacagaagcccaagctgaagcgattgtttcactgcaattataccggttaacgaataccgatgtgactgctttggaacaagaatcagctgaacttgatgcagcgattaaggaataccggatgattcttggtgatccaaaagcacttgcacgggtgattaaggcgcagttaaaagcaatggtcaaaacttatcggagtgaccgaaaaactgaaattgaagcacaaattgagacgcttgaaattgatacaagtgtgactgttgttgacgaaaccgtcatggttgcagttagccatgacggctacttgaaacgtagtagtttgcgctcgtatcaagcatctgaaggggccgacagcggtttgaaagacggcgattttgccattttacaaaagccactacaaaccttagatcaattgatgatgttcaccaattacggacatttaattcaacgaccagttcatgaaattgctgatttgaaatggaaggaaatgggcgaacatatttcgcaatcgattggtttggcggctgatgaagcggttattgcagcatttgcctttaagccaaatgaacaggctggctattttgtgattgggacggatgatggctatattaaacaaactgccttctctgacctcttgccaagtcgaacatatcgttctaaggcacaagactttattaagttgcatgcagatgctcatgtgacaaacgtgaactggattccaagtgatgaagggctagccgtctttagtgctagctataaaggttatggattgagttttaccttatctgaagtctctgtatcaggtgctaaggccagtggggtcaaattaatggatctcaaagatggggatgttgtcaccggctttacgttatatcatccagaagataaacatgcagccgttgccattgtgacgcaacggggcgcctttaaacggatgctcttaagtgaggttggtttaacaagtcgtgcgcgtcgtggggtcttaattctccgtgaattgaagaaagaaccacatcgggtagcagcaatggttagtgttgagcaggcaagcgagttactgattcatactgatcagcaagaagtgattgcaattaacccttatcaacatgcaactgccgaccgttattcgaacggtagttttgtgatggatgttgatgaagttggacaaccggcatttgttcaaacgactattccagttaaaaatgaagacgagtcaaaataataaaaaagcaagtcatctatgtgatgacttgcttttttctgttatacataatatgcggattttttggttttgtactataacagcaaaataagttttgcacaatttaaatggtggggttataaaaatattttaagtagataaatagctataaatcaatctttcaaaagagtttaagagtttctaaacaatcaaaaagaaagggcttgcataaactatgtgatgtgttatactaaaattgtgaaaactgtgataaacaacacttgactaatggaggtaatccacatggtaaaaaccgaaaaaattaacttagccgactattgggacggctttaacaaaggtgactggcaagatgaaattgatattcgtgatttcatccaacaaaactttactgcctatgacggtgatgaaagtttcttagctggtccaaccgaagcaacaacaacgttaaatgatcaactaatggaattgaagaaacaagaacgtgaagcaggtggcgttttagccgcagacaatgataatcctgcaacagttacgtcacacggccctggttatttaaacaaggatcttgaaaagattgttggattacaaactgatgccccattaaaacgcgcattcatgccatttggtgggattcggatggccgaagatgccttggaagcatacggctttaagactgatccagaacaacacaagatttttaacgaataccgcaagacacataatcaaggtgtttttgatgcttatacaccagacatgcgtaaagcacgtcactacaagattattacgggccttccagatgcctatgcacgtggtcggattattcctgacttaccacggattgcagtctatgggattgatcgtttagctgaagaaaaagtccgtgactttaatggtgttggcgacggtgaaatgacagacgatgtcattcgtcttcgtgaagaaatcaatgaacaatatcgtgctttacaagatatgaagaaaatggctgctagctatggctttgatatttcaagacctgctaagaatgcccaagaagcaattcaatggatttacttcggttacttagccgctattaagacacaaaacggggctgcgatgtcagttggccggattgatacaacgatggatatctttatccaacgtgatttagagcggggcttaattacagaagctgaagcgcaagaaatggttgaccattttgtcatgaagttacggatggttcgtttcattcggacagaagattataattcattattctcaggtgatccaatctgggcaacattatcaatgtgtgggattggtatggatggtcgtcatcatgtcactaagactgccttccgtgtcttgaagacattggaaaatatgggtgctgctccagaacctaatatcaccttactttggtcagatcgcttaccagaaggtttcaagcgctatgcaacagaagtttcaattaagagttcaacgattcaatacgaaaacgatgatttgatgcgtaatgaatgggggagtgactattatgggattgcatgctgtgtttctgcacaaccaattgcagacggcgttcaatattttggtgcgcgtgctaacttggctaagacaatcctttacgcaattaacggcgggatcgatgaattaggcaaagctcaagtcggcccagcttatcaaccaattacaagtgaaatcattgattacaaagaattcatgggtaaatacgataagatgttagattggttagcagacgtttacgttaatgctttaaacaccatccactacatgcatgataagtattactatgaatcagcacaattggcattgaagaatagtcgtttagaccggacatttgcgactggtatttctggtctatcacatgcggttgattcaatctcagcgattaaatacggccaagttaaagttatccgtgatgaagacggtatggcagtcgatttcgaagcgcaaaatccagactatccacgttatgggaacaatgacgaccgcgctgacgatatcgctaaatggttagtgaagactttctatacgaagatgaatacgcatcatttatatcgtggctcaaaattatcaacatctgttttaacaatcacatcaaatgttgtgtatggtaagaatactgggacaacaccaaatggtcgtcaagctggcgaaccattctcaccaggtgctaacccagcatacggtgctgaaaagaacggtgctttagcatcattactttcaactgcgaagattccataccgttatgcaactgatgggatttcaaatacgtttggtgtcacaccaaatacattagggcatgatgatgaagcacgtaaagacgcgcttgtgaacatggtcgatggttacatgattaatcaagggatgcatttaaatatcaacgtcttcaataagcaaaccttaatggatgcacaacaacatccagaagaatacccaacattaacggttcgggtttcaggttattgtgtctacttcgctgatttaacgaaggaacaacaagacgacgttatctcaagaacgttctttgacgaaatgtaatctaacgaaagtggatagcaatatccgctttctggtaaggtcgttaacgcgaattaacgactttaccagaaagcatagcttttcttttaagaggtgaaagtgaaatggcaattaaatttacaacacggttatcaactgaaaatgttgttccagaaaccccgataacaccagaggtgccaattggatatgttcattcgattgaaacatttggttcagtggatggtcccggaattcggtttgtcgcctttctacaaggctgtcgcatgcgttgcgaattctgtcataatccagatacgtggaatattggtagcggagaagcttataccgcagacgaattaatcgcaaaggcactgccatataaggccttctggggtaaagatggcggaattacctgtagcggtggtgaatccttaattcaaattgattttttaattgatttatttaaaaagtgtaaggtacaagggattaatacctgtttggatacttgtgggcagccgtttacgtataaagaacccttctttagtaaattcaaagaattgatgaaatataccgatctttcaatggtcgatattaagcatattgatccagcggggcacaaaaagttaaccggcttttctaacgaacatattttagaaatgattgaatatatgtcaaatcatggtcatcatatgtggattcggcacgtcttgattccagaacggacggattacgatgagtatctcactcgtctaggggattatattcaaacgttaaacaatgttgaccgagtcgaagtgttgccctaccatacgatgggaatcgtgaaatacgaaaagatggggattaaatatccgttagcggggattgaaccaccgacccacgatcgcgttgtcaatgcggagcgtctattgcatacagcagactatccaaagcagcaacgctaacataagaaaattttaagcctttaataagaatgagcaacgaaaggggttgctctttttttatatctttattattataatgataggcgtaaactaaagaacggagatttgaaaatgaaaacaagacaagaaaatatcttctcctctaaaacattaacctatttcctacagttagcggaaacgatgaattatacccaagcggcacaactactcggtatcacgcaacctgctttaacccaacagattaaaaaattagaacggatagtcggggcgcctttattttattcagtcggcaagaagttacatatttcggatgctggtcggacgatgttggatgctacccatcagattcatgatttattaaatactgcgacggatgaaattcaaagttcaacgagtgcgacgcgcggtaagattaatattgggattttagcatcgatggaaatcagtgttatccaatccttcttaattcaatactataaacaatttcctgacatcgaagtcagcatgcacttattgactcggaaagaaatctgggaccgacttgaaaataataaaattgatattgccattatgtatttgccagatgacagcattaagaactggaaaccttataagtcacataagattgtggatgaacgcttactctttatcagccaagatcctgctttaaagacgcgtaagaagatccgttttaaagatacattagataataaatgggtgacatacccagatgaatactatttaaatcaattcatcagtgaagcctataagaatcaattggttgatcgtccagtgagtgcggctcaattcacatcaccatttgaaatcatgcgttttgctgaagcaactgaattaagtacagctttaccaaagagtttttatgaagcacataatttgggacttaagggaaacgcggttcaatttgatccggccattcagttcgaattagcttttgtcttccgcaaggaaaaggaagatattccacggattaatagctttttccgtgaattcgaccattatttagaagaaaaagattatttaacacggattagagagcaaaaccgtagaatcgtctaatatttttggtataattaggatgttatttttttaaaaggaaggtctgtataaatatgagtaaagaattagtattcggtcaccaaaacccagatacagacgcaattgttgcggcaatggcgtttgcttatcttcaacaacaactaggaaacgacgtagaagccgttgcgctaggtgaacctaatgaagaaacaagctatgcattgcgtcattttgcagcagcaacccctcgcatcattaaagaagcaagcagtgaagttgacagtgtgatgttggttgatcataacgaaagccaacaaagtgttgccgatatcaaagatttaacagtgacgcacgttgttgatcatcatcgaattgcaaacttcgaaacagtcagcccattattctaccgcgctgaaccagttggctgtaccagcacaattttattatcaatgttcaacgaaaacaaagttgaaattccagctcaattagctggtttaatgatgagtgctatcatttcagatacgttgttgatgaaatcacctacaacaactgaaaaagatcggattgcgattaagacattggctgaaattgctgatattgatttcgaatcatatggtcttgaaatgttaaaagcgggcactaacttagatgataagagcgaagctgaattaattgaagcggatgctaaaacattcgatatggctggtaaaaaagtgcgtatcgatcaagtgaatacagttgatatcgaagcggtcttcaaacgccaagctgcttttgaagctgctatcgaagcagacaacaaagctaatggttacgacttattcgtacttttgattactgacatcttaaacagtaactcagaagcgcttgttatcggtgaaccagcagaagcctttgaaaaagctttcaacgtaaaattgaacaaccatcgtgcacaattagccggtgttgtttcacgtaagaaacaagtggttccacaattaacagaagcattttaataacgattaataataaagtccttcggggctttatttttttattaggaggataggtaaatgaccgaggaaagcattgatgcaattcaagtgattgaagcgaccattcgaaattgccaaaagagtcagctgaagtttgtagcgggttcggctcaatttactttattaaaaaataggctttacgcattagaagttggtcgtgatttattgaacgggcacacagacataacagtcgaagccttagtcgaggcacaagccccgattgaatcgattattcataaaactgaaaaagcactctctaatcaaaaaaaacatcacccgtgataaaacgaatgactctattattagcagcgatgactgccgtgcagactgctattataaaccaactatctgcaaaaaagccccctcattaatttggggggctttttttgtgtgccatcagattggaattattctaatctaactaaaaatgtgttataatgtaaatgaattcacaagaaggagcgattgacgatgaaacataccatcaagtttgccttaacaattagtgtgggtgtgattgcgctatgcttggcgtttttgctacatgagccattgtgggcacagattttagtgagtttagcggggagcttagtagcgctctcgatgtttattgagatgattaaaacgctaaaatctggtcaatacggggtggatctattagcgattaccgctattattgcgacgttagcggtcggtgaatattgggcagcactaatggtcttggtcatgttaactggtggcgactcattggaagactatgcagcgcataaagcaggccgtgagttaaagacattacttgataattctccgcaaacagcgcatcgccttgttaatgatgcggtcgaagatgtttcagtcgataagcttcaagttggtgatcaagtgattattaaacctggcgaattggtccctgttgatgggcatattattgcaggaagtgctttattcgatgaatcatcgttaacgggtgaatcacgccccgttgaaaaagcactaaataatgagctcatgtcaggctctgtgaacggcgatacgtcggttaccatgcaagttgaccaattagccgttaatagccaatatcaagcaattgtacggcttgtagagacctctgcggcacaaccagcgcattttgtgcgcttagctgatcgatatgccgtgccatttacattagttgcgtatgtgattgctggagtagcttggtggttatctaaggatccagtacggtttgcagaagtgcttgtcgtggcttcgccgtgcccattaatattggcagcgcctatcgcgttaatctcagggatgagtcgtgctagtcgaaacgggattattgtcaaggctggcacaacaattgaaaaattagcgtctgctaaatcagcagcgtttgataaaactggaacaattacgaatggtcaattgacggttgaccaagttgtgccagtgattggtatcgcaccaaccgatttattgcaattggcggctagtgcggagcaagaatcttcgcatattttagcacggtcacttgttaaagcggcacaggtagaacaattacaaccaattgaaacattaaaagaagcaacgggcgctggggtagttgcgacgctgtcgtctggacaaacggttcgtgttgggaaacatcaattcgtgacgccagatgcgcaacagcctctgcaagaacaaaccactgtttacgttgcgatcaatgatcaatatgcggggtacattacgtttatcgatcatttacgaccagaagcaccggccacgatgcagacgctccatcaactggggattacgcgtttgatgatgttgacaggcgatcaagcgacaactgcgcaccagattgcggaacaagtcggaattgatgacgtccatgcaggctgtctgccagtcgataagattcatttaattgaacaagtaccgcaagaccaacgcccactaattatggttggtgatggggtcaacgatgcaccgtcactggcaagtgctgatgtcgggattgcgatgggggcccatggcgcaacagccgcaagtgaatcagcggatgtggtgattctaaaagatgatttaggacgggttagtcgtgccgttcaaatcgcgcgtgacacgatgcgcgttgctcgccaggcggttttgattgggattgcaatctgtattgggttaatgttgattgccagcaccgggattgttccagcattagtgggggctttattccaagaggttgtcgatacagtttcaatcttatatgcattacgagctagaacggatcgttaagggaattaaaaagagccgtattaacaccattcaagtgttaatacggctctttttttgtttatttttcagattgtacgtgtaaaaccatgtcttttggtaaatataacttaggcaccatggctaaacaaatacatagaacgatgccggttagaatgaagctagcgataaagctgccaccgttaacagtgagcgagtatagccaagcattcatacctttgggagcgtatgagccccaataaacggcaccggctaagaagtggcagaagtattttgcaaaagtaccaaaaaatgcggccatccataaaagggtcatcgttttgacttttgtatgattttgaatacttgcttgaataggtcgttgtaagatacctgctaaaccaacaaccatgaaggcaatggtaaattctagcaatccttgccatacgttcaagacactaccgtttcctaatccacgtaagattaagtctagtagaccccagattaagccggagaccattccaggaatggcaccacggcgtaaactgtagattacaatagggataatcccaaaggagacttcgattgcggaaggccccactgtatgggggatgtattccaatgccacggcaaatgccgcgatgattgccccttcaatctgaatcaatagacgctgatgttgcataaaaataaccccttttcttgttcaaccaacacaaaaaaggagttatcatttcaactccatcacaattcctacgcttgtcttaacaaacaggttcgaagggtctgattaaaatcactctcagccaatggctcccctttgcgatggttaacatttaatttttaggaacgctttcagtatactcgatagctggtataagtcaagcaatgtgtaaatcgacgaattgatgtaaaccaaatgactgttagaacgacattgataatcgttgccaagaagagcactaatagtggctattcaagctggtccattgccgagcgttgttcatcagcaacgacgtgcgtatataagtgagtagcttgcgtggtcgtttggcctagttgggtcgcaacaattgtttcactatgagttgccgccatgagatcagtggcaagtgtatggcggaacttgtgtggtgtgagacgcacgccaaatgcttcagaatacttcgcgactaacttttcaatggcatagttgctcatacgcttggcgctgccacgatagcgactgacaaataaggcttgttcattatcttcttttagatagcgtgatttacgaatctggcagtaatcccttaaaaaaggtaaactccacggagcaattgggacagtatcttgctgtccgcctttacggatcacggtaattgtaagttgttcaagattcaaatcgttgatgttggcttgggccaactctgatagtcggatgcccgttgccagcgccagtacacagatggcaatatcgcgttcgcaattttgcttgtatgatgccagttggcgattagaaagcaagttagggtaatcaacttgcatgaaggtgatgaagtcgtgtttcttttcaccggtcagcagttgtttgctgatgtgtcgtgaacgtgtcgccattgtttctgaagctttaagtagtttcaccttcttcatgacgtttcggtaaaaataaggctcaccatcagcttgttcggcttcaatggttaagaagtaccagagcgcatttaatgcgttaatcgagcggttaacggcttgaaaggagagcttatggttattttgtttacgcttattcattagaaaaatcttgtagagctcaatatcttcgagtttcattttttcgagtgcggtcagtggcatctggtcgatagaggggaccacgacgatctgttcatcaactaaccaggtgaaaaagcgaacgtattcttgtaagtattgatagagcgttgcagaagagtaggcgtttgcctggcggttaatgtagaatttacgaatgtaatccggaagattggcgagttgcttttcgcagagttctaagtaacgttgttgatccatgatggaagactccttaattagcagtttaaagatagtttagcaaaaatgaggtgagaatactacaagtgttgttaaaaccataattttaacaacacttgtattgcaaaccgttccgctgtattgcaaaccgttccgctgtattgcaaaccgttccgcgaactgatgatcagatggtcttattcgactatctgcacagcaacctaaagatccttattccgtttaaaagctggtatatcaacgtttaaggccttttttaacgatttgatatgtgagttttaaggctaagatgtgttaatatgcgtatttaccaattaaaatctggcataatcgtcagattaatcacggatttgtgcctgagcttagatgaattctgcatttaaagttaagtttggcgatatcggttggccagtcagtttgattcatcatattggcgttgagtaacttgtaatagtttatgaatcgtgcagtgtaaaaaacaaacgcgttaagtgcggttcatcaaatcaattgaatgatgttggataataagtggttattttagcgctctttcaagggataagcgtttcttcgcataatatatattatgtaaactaaaatagatttaaaaaattaactaagcctacccactcgtcaccagcgtttaagcgcagcaaaaaagcgccatattaaaatgacgcttctgtaattagtgatttaaaaactgagccaacaaagctgcaaagtcatttggattttggaataacgccatatgaccagcatctgggtaaagttttaattgggaatttaaaatccgttcatgtaattcatatgaaccattaacaggtaccattcgatcgtgatcgccgttgacaatcaatgttggttggttaatttgtgccaggtttgccggttgatcgtgcgcatactgtttaattgctattaattgacgacgataagtggctaacgtaatggctttatcttcaacaatttcacgctgttttaaccggttaatgaacgctttaccagcctgtttgccttggggcgttctggtgaagaagaggtattccttaacgtctctatgcgttaagaaggaccgaattaagtcaaaagttgttatgcgccccactttggcgatttctgagtcaccctggggacctgttccgactaaaattaagtgattaacgcttgaggggtattttaaagtgaaggcctgtgcaataaaaccacccatcgataatccaagtaaatcgaattgagtgagctgcatagctgttataaaagcataacaatcagctaccatttgctcaatcgtcgtggggactttgccatccgagaaaccaacaccacgattattaaagacaatcacgcgtcgttgctgactgatcaggtcaattaatgcagggtcccagttatctaaagtggctgataagtgattcaataaaacaagtggtaagccgcgaccggtacccacttcgcggtaagcaaaccgttggccttgttgatcttgaataaattggttgggggttgttagataagtcatcttgattagcccgcttgaaccttaatcaccactttatcagttggatggccgtgagcaacaagttctagtgcctctttaacgtgtgctaaatcgaattgatgcggatcgatggctggtacaatcgcttgttgttcaacaatttcagtgatttttttgagttgggcaccatctgaacgaacgaaaataaagcgatattcaacgcacgcttttttagcgaggcgatcccatttccgcccggccaacgagaataagagttgcttccaaaatggtaattgcaattgtttagcgaattgtttgtttggaccggcaatcaagcttaaaatccgcccgcccggcttcataatcgccatttcacgttcaatatctgctccaccgcgtgtatcaatcacgtaatcgatttgatctaaaacttcccagtaatcggttgttttgtaatcgatatattggtcagcacccaaattcaaaatgtgatctcgcgcggctgcattgcctgaaacaatcacggttaagcctagtgattttgcgattgggacggctattggaccgaaaccgcctgaaccaccagggataaacagcgttcggttcggttgggctgccaattcctcaaatagcccctgataagccgttaagccagtcagtgggattgcaacggcttcacgtagcgataaatcctttggcgtgtaccagattgcatcggtggtaaccgcgacatattcagcaaagccaccgattttagccaatggtaaacgcgcatagacttgatccccgactttgaaatcagtgacgtctgttccaatcgctgtgatttcaccggcaatttcattgcctaaagtcagtggtaaagcatagttttgcattaatttagtatcgccgcggatattcattggatccaatggattcaccgctgcataggcgactttgacgagtacttcattggctagcggttgtgggcgatcaatttcttgaatcgtgacagctagtgtttgattatattttttaatttgagctgctttcatattagaaaacctctttccacgggagtgtttgtagggtttgttgcacaattgctgttagcgtagttgaatctgggttcactttagccatgacccggataccaatgagcgcactttgaagcgatgcagctaaaagatcaattgcaacagacggttctagttcggcctggccggcaatcagtaatgcctgcaacagtgctttttcttgggttaaataatgctgaatcagcgtttggatgtctggttctaatgaatttaacgttgccgcggtattcaccactaagcagccggctggttggttatccggatggtcaataaatatttcaaaaatggctgttaagcgcgaccttaaatcggtatgtgttgccagtacttgctcgaaacgctcgttaatttggtcacgataatgtgctagtacttggataaacagttcatgtttatcgccgaatgtatcgtaaatactgcgccggtgaatccccattgcatcaactaggttttgcattgaggtattctcatagccttgttgccaaaagacaagcatggctttgtctaagacaaccggtgcttcaaatgtttttgtccgcatctggatgctcctctcttattagaacgttcattctaatataaacgattctttgaaataacgcaactagattttgcgcaattttaaggggcaataaaaaagaacgcctcgaatgagacgttcttgtcagctgttattttgtccgatagaaaataccaaacgcccctaggccaacgtgactcataatgaccgggctggttagtgcgactgtataaggcacatggggctgtgtttcttcaagcgttgcttggatcttagcggatagttcatccgtgattccgacgtgtgagatgccgatttccgcaacgtcttgggtggctaagtattcacggatattgttgatttcttttgtaaaagcttttagtccccgcccctttgcgacgacttctaattccgtatctgttaagcgcacaattaccttaagtttaatgattttcgttaatagcccggccattctactaattcgaccaccgcgttgaagcgcgtcaagtgaatctaaaaagacgtaggtttcggttttacgacggatgtcatcgagatgcgcgataatatcatcaagaggcttccctgcttcaacgtcttgggcggcagcaaccacttgataagcaagtccacggtcgattgctttactatcaatcacgtgtacgtcacttgttgattggtgggctgctgtgtgtgccccttcgattgtgccacttaacaagccggtacaatgaatcgatagaatcgtactaccatcagcccctaattgatcatataaatcgacgaaactgccgacagttggctgacttgttgttggaaaatcggtcgttgcattttgtaagcgacttaaaaattcagcgcgggtaatggtttgtccatcaatgaaagactcatttccttgttgaatcgttaaggggacgatgtgaatgtcatatttggcgcgttcgtctgctgtcagttgaatcgatgagtccgttacaattttaattgtcatatgagttgtactccttcaagttaaatgttgaggtaaattgaaaaaaacatcagggtcgttccgagcattacgaaaaagtgccaaatcaaatgtaagccaggaattttaggaaaactataaattagagcgccaacggtaaagactacgccaccactgactaacagccaaaaaccaactggactgaggttgacataaagggtcttaccagctaataaacataaccaccccatcacaacgtaaatcgttgtttcaatcttttggtaccgaccgtggctcaaaatgtgcgttataataccggcaatcgctagtgtccagattgcaatcagtaagctaattcctgttgcatggccaataaaaatcaaacaatatggcgtgtaggtaccagcaatcagcaagaaaatattgctatggtcgaatatttgaaacacgcgcttggccttggtaaatgctaagcagtgaaataaagtcgaagcgagatacagtagcagtaatgtggcgccatacactgctagactagcaatcgcgactggtgagagtgttttatgaatgcttttgaccaggagcatgatgactaacgttaaactaccgaaaaaaccaatcccgtgggtaatggcattccatatttcataaatcagttgttgtcgtttaatcgtggaaagttgcatggttctcgcctctttttctctatttgccgagtattatagcgcgaatgtagattataagtcaatagataatagaattcgattctatgttagtgacaaatgataattgctatggcataataaatatactatcaacagattggtggcgttaatcagtatgcaatcacaagaatttgaaaaatggttgggtgactttcaacaattgcggttaccattatggtctgaatttccagatttagacctctatatggaccaagtcattagtgaggtcaataaacgactgagtcctttgttggacgttaaaataacgaaaacaatgattaatagctatgtcaaaatggcgattattgaacgaccggaaaagaaacgctataatcgggatcatttagccgaattgattgtggtcagtattatgaaattagtcttcccgctcgatgtcattaaacaagggatttcgcaatcgttggcaaacgacaccgctggtaaggcatatgatcagtttgtgcggttatttaatgccgaaattgcgaatattaacgcgcaatcaacggttaatgaattcaatttaaacgaggaaccgctcaacattgttcaaaaagtagccgttaaatccgttatttataagctaattgggacgaagttggttaccttagaagaacccatttctatcttataagtcacaaaaaaagcctgtcgaattgttcgacaggcttttaaattaggctttatcaaaatctttaatccaagcaagtgcaatggctttttcaccaagatgggtcccgataactgggccaaagtagctgatatcaattggtaagtctggatagtttgcttgaagcttatcacgccatgcaatcgctgctggttcatcgttagcgtgaatgattagtgcgcgtaatggatagtcaacacgttcggctgtttcagcaaaaatttgttcagcgcgggcgtaagccttcttcaatgaacgaaccttctcaaatgccgtaattttgttagtgtcagcgtcaaacgttaaaagcggtttaatcttcaacatgctaccaataaaagcagatgcgtttgataaacgaccaccacgcactaagttttgtaagtcgttaacaatgaaacattcatccattgtgctttttagatcgtcaaggcgtgcgataatctggtcgacggtcacttctgggtcgcgtgccattctggccgcttccattgctaagtagcccattaacatcacagtaatccctgaatcgtatgggacaacctggatgttatcgatggtgcttgccgcatttttcaatgtcgtgacaaacccagagatggtactagcaaggtggatgctgatgacagcatcatacccttcgttgccgaggtcttcgtatagttttaacatttcacccagtggtggttgtgatgtactggggaatgtttcggatgtttttaatttttgatagaactcttcagtggttatatcaacgccttcatcatagacctggccatcaaggataaccggaataggtacgacgaagagatgatggtctttcacttgctgttctgtgagataagcggtactatcagtgactacagcaattttcatggtgacacctacttttttattattcggtaataactatatcataaatggtaggttaattcccctaaaaatgccgattttccgaaaaatgtatagggcgtctcattttaatggtcgattaaagctttgataataacggttcagtaggatttttaaaagttgctgttcatcggtactccagttttgttgaatgtgattttcaagttcagtttgaagttgttgcaacgtacttaatgccgttttggcggtcggtgttaatgcgtaaacgcgttggcgcggatcagccccggtcacttttgttaacagcccttcttgagccatcgtatttaactgccgactgagtgtcgatgcatcgagtttggttaacgtggttaattctgcgtgcgaaatgcgttcttgatcgggttcaatggccattagaatattgacttgggctaacttcaagtcgagtcgtagcgcccagtgtttcttttgttcttgatacaatagattcagttgattaaacgttgctaaggttgagcgcacggtaaatccccctttaattgtataaagcaatttgataattgtattatacaatagtcgtgttagcgattgcaaacaactaatttctttgaggttccactgcaaaaccgttacaataagtaagacaattcaattatagagagtgtgagcaataatgacctttgatggtttaatgacccacgccgttgtaaatgagctaaatacaactttagcagacggcaaaattacgaaaattcaacaaccttatccaaacgaagtaatcttaacgattcgggcaaatcgtaagacctatccccttctcctatcagcccacccatcttatgcgcgagtgcaagtgacgcgggtgccttatgcaaaccccgcaacgccaccgaacttcgcgatgtctttacggaagtatttagatggcgccattttagaaaacatcaagcaaattgaaagtgatcggattctaagattcacatttaaatcacggaatgaactgggggacttacaacaactatgcttaatcgttgaattgatgggccgccatagtaatgtgattttgattaatcaagcgaccaataagattctcgatttaatccggcacgtcggtgtttcgcaaaaccgttatcggttcttaatgcctggtgccgattatgttagtccaccggctgcaaccggggttgatggttttacgactgatttaaagacgcttgattggttaagttattataacgaagctgctgatgaacaagtcaaatggttacaacaacacttccaagggatgagtcgtgaaagtgccgttgaactacaaacccgtttaatggatcatgacaattatttggcggttgtgactgatttcttcaagcaattcgaccaagtgacaccaacgttaacagttggtgaaaagaagtcgtggttcacggccttcccttatgagagcctgacagggacactgagccattttgacacgttgagtgagctgttagaccaatattacttacacaaggcgcagcgtgaccgagtgcagcaacaaggtagtgcgctcatccacttcatccgcaacgagattcaaaaggatgaaaagaaactgaaaaaactacaaaaaacgttaaaagcagccgacagtgctgatgattaccggattaagggtgaaattttgaccacctatttgcgggaagtcgaacgtggcatggctgaagtcacgttgcccaatttctacgacaataacgaaccgcttaagattaccttgtcgaaccagattagcccttcaaaaaatgcgcagaagtatttctcgaaatatcagaagctccggaattcaattgcctacgtcaatgaacaaatggcaaagaccgaagcagaacttgcctacttcaacacgattatggcgcaaattgaaattgctgaacccaaagatttagaggatatcaaagctgaattacaggctgaaggttatttaaaggctaagaaaaccggtgccaagaagcagaaacgttacaagattagtgaacctgaagttttctatgcgagtgatggtacccggattttcgttggcaagaataactatcaaaatgatcaattaaccttgaaaaaagcccataaaactgatatctggttgcatgtgaagaacattcccgggtctcatgtgattattgatagcccagatccatcagaagatacgcttcaagaagccggcaacttagcggcctacttctcgaaggcgcgcttatcagcggccgtgccagttgattatattcaggttaagaagattaaaaaaccgaacggtgcgcgaccagggtttgtgatttacgaagggcaacaaacactttatacgacaccagacgagcaactcgttcaaaagctacgtaacaaacctgtgcaagactaataaaaagcgttactccaaagtgaattggggtaacgcttctttgattggtgcggctgatggcacacgctaaacgtgttctgcaagccattactttccggttaacactctattctaatgggcgtctgaccatgcttgtgggtcttggcgccattcattgagtgatgtggcttgttctggagttaagttatcagcggcttcttcgaccgctaataaggcggagaaattcgataaggtcgttagtggtaagttagcagttgcgaaattctgttggccggctgctagttcgtatgaaaagatgccaaaaataccaaggacttctgcgccctctttttgagcggcggccgctgcttgtaagacactcccgccggttgaaattaaatcgtcaatgaggactaatttttgaccggctttaaacggtccttcgatttgacggccttgaccgtgatctttcggtttcgaccgaatgtaaaccatcggtaagtcgagttcggctgcgacccatgcagcatggggaatccccgcggttgctgttccgccgatgacttcaacgtctgggaattgcgctttgattgccgcagctaagttgctggcaatgagcttgcggacttttggataaccaatcgttaaacggttatcgcaatagatgggacttcttagcccactcgcccaagtaaaagggttgttaggactgagactgacggcatgaatatcgattaaggcttgtgcgacttggtgtgcaattgttgtcatttgaaagactcccattctgatttgatagcttggtaagcttgatatggatttgtagcttgcgtaattgggcgcccaacgacaatcgccgagctctcagcttgtgcggcttcgtgtggtgttacagcccgtttttgatcattggtttggcttgttgctggccgaatcccaggtgtgacgcagagaaaatcagcattggtgtgttcgcgaatcgttggcacctcttgagcagaacagaccacgccatcgcaatccgagttctgtgcgagttgcgcatagtgtgcgacagattctggtaggctgacattaacgagttgttcggtttgcatttgcgcttcgctggtcgacgtaagctgcgtaatcgctagtagtttagcgggccgcacgttgccaagtgcggcgccttttttcagaccagccgcccctgctttgagcattgcctgcccaccagctgcgtgaatcgttgtgtaatcgacaccgagttggccgataacagtcatcgcgctttgaacggtgtttggaatgtcatagagttttaggtcgagaaaaatctgatagccgcgcgcttttaacgttttaatcagctgtggtccctcttggtaaaaaagttccatgccgactttaacgaataaggattcatcagttggaaattgcactaaaaaacgatctgttgtttcccagtttggaaagtcgagcgcgataattaaagggttagtcatgagtgccctcctgtggtagaccgaatgattttaaatcggttagttgatatttagcgagttcatctggtaatgcggcgattagttttggacaggcaaatggatcgctgaaattagcagtgccgactgcgatggcattggcgccggcggccattaattcaagtgcatccgcagctgttgagacaccgcccattccaataatcggtaatttcgaaattgaacggacttgatgaatgagccggatggcaacgggttttatcgctggtccagataagccgcctgtttgattagcgagaattggttggcgtgtttttggatcaatccgcatccccaccagtgtattgattaatgagaagccggctgcccccgctgcttcaactgcttgcgcaatcggacgaatatccgtcacgtttggtgagagcttcacgtaaaccggcacttggctgactgcaacacaggccttcgtcaacgtggcagcggcttctggtgatgtgccaaattcaagaccgccatgggccacgtttgggcacgagatattcagttcgatggcatggacgttgggcgcttggctgatttgttcacagacagcgacgtaatcagcttcggtattgccggcgacattggagatgattggtaactcgggataatgctcggctaaccagggtaatttttcttgcataatgacttcaatcccgggattttgtaagccaatcgcgttcaacatcccacttgggctttcagcaacccgtggtgtcgcattgccaagtcggggttctttcgttgccgctttgataataattgcgccaagttcgttgaggtcataatagcgaccgtattcctgaccgaagccaaaacacccggaggcgggcataatcggattttttaaagctaagcctggtaaagttactgctaagtctgtcattaaatgagcacctcgttcgttttgaagacgggtccgtcatcgcaaattttgagctgaatgcttggatcacgtttgagtttggtgacacaggcgtagcaggcaccaatcccacaagccatccgttcttccaatgagatataggcattgggatgctcactgaatcgattatcgacggccattaacaagccttttggtccgcatgcgtaaatggcatcatatcgggttgtcgcatcagcaaactgtgcatcgagtaataaaccaacatggccttggtagccgtacgagccatcatttgtcgcataagcgactggcccgagcttgcgaaagtgatcttcatagaaaatggctgctttagttgcaaagccgaacacgtgttgaacgtgaacgccttttgcattaagttgccgtgagagttcatgtaatggtggaatcccagtcccgccaccaatgattagcgcgttttgtccggctactaattggtcaattggataaccgttaccaagaggccctaagacggacaagcttgtgcccaccggtgattcacttaagatcgtggtgcctccaccaacaacgcggtataacaaggtaatcgtgttagtttggcggtcgacattggcaatcccaaatggccgacgtaataaaagggcgtcactggggattttgatatcgacaaattgtcccggtgcaatgggttgctgtgcgaggtctccggtgaggcataattcatagatactgggggcaatttcggtttgcttagtgagggttaattggtattctaatggcaacatttagcagcctccttctgatttttatgtaataaaagagccttaggcaaagggcttcagactcttttagtggttttaaagtggtttggtcaggagcgattgagattctaggaccgctaagatcgcatcagcggtatccaatgaggtcatcaatggaatgccgtgttcaatggcggtttggcgaatgacgatgctgtctttagcgacttgtggggcttcgttcaagccggttgtgttgatgaccagttgaatgtggccggctttgattttatcaagtaaatcgccgctcgtagcattaatcttggcaacggattgcactggcacacctgctgcttggaattcttgactagtcccaggcgtggcaatgatttgatagccaacttcgcggaagcgttttgctaattcgagcgcttgtgtcttatcttggttagtaattgtcattaagacgttcccgtgacttggtaagtgcatcccactagcttcgaacgctttatagagtgctttttgcatcgttacgtcagttcccatgacttccccggtcgatttcatttctggcccgagtaagctatcaacccgcgtgagtttcgagaatgagaagacaggtgctttaatatgaattagtgggcccgctggtaatagaccggttgggctctttaattcagctagtgtgctgcctaaaatgacttgggtggccagttgcgccatcgagatgccggtgactttactcaagaatggaacggtccgactagcccgtggattgacttcaatcacgtagactgcttcattttggataatgaattggatgtttaacaagccgcgacattcaagtgctaaacagagcttggtcgtgtaagtgatgatggcttgtttttccgcatccgtcagattttgtggtggataaaccgccattgaatcgcccgaatgaacaccagcgcgttcgatatgttccataattcccggaattaagacatctttgccgtcacagatggcatcgacttcgcattctttgcccattaagtagcggtcaattaggaccggttggtcgactgaaactttaacggcctctttcatgtaatgtgtaaggtcttctgcagtatgaacgatttccattgcccgcccgcctaaaacgaaactaggtcggattaagaccggataaccaatctcttcagcaatcttcaacgcatctggcgtattggttgcggttgccccgactggttgtggaatgtcgagttcggcgattaattgatcgaattggtcacggtcttcagcgcggtttaagttcgcgacgcttgtcccgagaatctgcacaccattttcggtcagtggttcggcaaggttgatggctgtttgccccccgaattgcacaatcaccccttctggtttttcgagttcaacgacgttgaggacatcttctagtgtcagtggttcgaagtacaatttatctgaaattgaaaagtcagtcgaaactgtttctggattactgttcatgataattgcttcgtagcccgccttttggatggcttgcacacagtggacggttgcataatcgaattcaaccccctgcccaatccgaattggaccggaaccaatcactaagattgaaggctttgtgctgacaatgctttcgttttcttgttcgtaagtcgcgtagtaataaggtgtttgtgattcgaattcggctgcacaagtatcgaccatcttataaactggctgaatgccactttcttggcgcatttggcggacttgggcaggcatgatttgccaagttgcggcaattttagcgtcggcaaagccatttttcttggcgagttcgagtaattctaagtcacctttatcggtccggagttgttcttcaatttcaacaatgtggctgagtttatccaggaagaaaagatcaatttttgtcaattcactaagttcttgaattgaataaccgcggcgcaatgcttcggcaaggtagaaaagtcggtcgtcttggggatgtacaatccgttggacaaggtcgttatcaccgactgccgtcaatgctggaatttcgagatggtcagtaccaatttcaagtgagcgaacggctttgagtaatgcttcttcaatgttgcgtccaatggccatcacttcaccggtggccttcatttgggtgccgagttgccgatcacctttgttgaatttatcaaatggccaacggggaatcttcgcaacgacgtaatcgagcatcggttcaaattgcgcataggttgtcccggtgattggattatgaatttcatcaagtgttaaaccgatggcgattttagccgccatttttgcaattggatagccagttgctttagaagcaagggctgatgaacgactcacccgtggattgacttcgataatgtagtagcggtcgctattaggatcaagggcgagttgaacgttacagcccccttcaatcttcaaggcgcgaatgattttaagtgcggcatcgcgcaatgcttggacttcacggtcacttaaggtttgaacgggtgcaaatacgatggaatcgccagtatgaatcccgactgggtcgaagttttccatgttgcagacgactagcgcgttgtcatttttgtcgcgcatgacttcgaattcgatttccttgaaaccggcaatactttgttcaacgaggacttgtccgactggagataggctaagcccgtttttgacaattgtgctcagttcaccggcattttcggcaatcccgccaccagtgccaccaagggtaaaggctggacggataatgaccggatacccgttttcgttaacgaatgtttgggcttcaacgagtgaatgggcaatcgcagattctggaatcggttcgtttaactgattcatcaagtttttaaacagttcgcggtcttcagcttgatcaatcgcgctgagcttggtaccgagcaattcaatgttcagctcggcgagaatcccgttgtttgccagttccaaagccatatttaatccggtttggccgccgagggttggtaagatggcatctgggagttctttgcgtagaatttgcgtgacaaagtcaatcgtgatcggttcgatataaaccgtatcagcaacggctttatcagtcatgattgtcgcaggatttgagttaattaaaacgacttggtagccttcttctttaagcgctaagcaggcttgagtgcctgagtaatcaaactcggcggcttgaccaattacgattgggccagagccaatcactaaaattttatgaatatcggtacgttttggcatcactaaatcccctctttactatttttggcggcgattgaagtcatcgatcatgtcgataaattcatcgaatagatgtgcagcgtcgtgtggaccaggggctgcgtctggatggaattgaacggaaaaggccggatattgtctatgacggagaccttcgactgtttgatcgttaatttcaacgtgtgtaatcagaaggttttgtgggtcgatggagtcggcatccacggcgtacccatgattttgagatgtgaagtcgatccgtttggtggcaacttctcggaccggatggttgaaaccacggtggccgaacttcatcttgtaggttttagccccattggcgagggcaaaaagttggtgaccgagacaaatcccgaaaatcggcactttaccttgaatccctttgatcatttcaatggcttctggcacatcttctggatcaccagggccgttggttaacatgacgccgtctggatcgagactcagaatttcttcagctgttgtgttgtatggtaagacagtgatgttacagtcgcgttttgacagttcacgaaggatactatgttttaagccaaagtcaatcacgacgatgttccgcccgttagcaggactcggataaggtttggccgttgagacttgttggacttggttttttggtaagaccaatgccttgagttgatcgaacgcgtgatcgtctgcggcatcaacgatgctggctttcatggtccctttatcgcgcagacggcgagtgagtgcccgcgtatcgatgccggcaatcccaggaattttcttttgctttaaaaagtcatcaagactcatattcatccgccagttatttgctaggcgtggtgtttcatgggcgacaactcctttacaggttggtttaatcgattcaaagtcgtcgcggttgaccccgtaattaccgattaaagggtatgtaaaagcgatgatttggccgttgtatgattgatcagtaatggtttcttggtacccactcatcccggtgttaaagacgatttcgcctgtcgagataattggggcgccaaaaccggtgccggggaagatggtgccatcttctaaaataaggtaacgtttcatcttttagttcactccttttttgaacgtgctttcatcaacaacttcttgtcctttacgacacttgtcaaatcggtgtctgcaacaccaatccgccaagtcaggtaaatgctcagaagttacccgttgatgacacactccttttgatatgcaatctgaccagcaaccaaggttaataaagtatcaccttgcactgcttcgccgataaatggcgtgttgtggcctttcgataagaaagtgtttgcgtcgattgtggtggtatccgttaaattaaaaacagcaaggtcagctggttggccaaccgctaactggccggcgtgtggtaagttgaaaacatgggccgggttggttgttagccagcttgtcagttgcgcgagactaaatggaccgttggcaactaaatgcgtgtatagcaagctaaaggctgtttcactccctactataccaaatggcgctttcaataacgcctgttgtttctcttctgtggtatgcggtgcgtgatcggtcgcaataatatcaatcgtcccatccattaagcccgcccagagtgcttggcgatctgcaagtgttcgaagtggcggattcattttgagcattgcgttgtcactggtaatcgctgaatcatcgagtaacaaatgatgtggggtgacttcgcaagtgacgttgaggccatcttgttttgcgcggcgaacgagattgacggtttccttagttgagatgtggcagatatgataatgaacgccggtcgcccgcgctagctcgatatcccgggcgacttgggcggattcactgacactcgcaattccgggaacgcctagttttttagcggcttgaccgtcgtgaatgacgccgccattgacgagtgattcatcttcgacgtgcgcgacgatgggcatgttaatctgggcggccatctgcatcgcttggtacattgtttgtgccgtttgtaccccatgaccatcgttggtaaagcctgctgcaccagctgccttaaacgccgacatgtcgacaattgtttgttcagttaactcattggtaatcggtgcaaattgatatgtgtggacgctggtttctgcctgattgcgtgcaaccagtgtcttgaaatctagcaagttatcaggtacgggctttaagttcggcattgcaattacgctagtaaaaccaccgtgggcaaccgctgcgctccctgttttgagtgtttcttttgtcgtgaagcctggatctctgaagtggacgtgtccgtcgattaagccggcactgacgaaatggccgtgtgcgtcataaatcgtttctgggtcggttgggactgcggtaatcgttggttcaattgccgtaatctgaccggttgcatcgatggcgatgtcgcgtttttgcagttggccgtcaatcaagacttggccgtttttgatcaattgatacatagcagatccccctcttaatgttgaatcagatgttgttggtctaataggtgttcaatgatggccatccgcataaaaacgccgttggtcatttgtttaaaaattcgcgattgtggggcttcaacgagttcgtcggcaatttcaacgtcacgattgacgggtgctgggtgcaaccagatagcactggacttaaggtgtgctgcccgctcagttgtcaaaccgtactgagtatggaatgcagtgtcagataaggtttcatcggcagcaaagcgttcgtgttgaatccggagtaacatgacgacgtcaacttctggtaagacgtcatcgagttgggctggttgtccgtattgggcaaattcaggggcgaaccattcctcagggccggcaaaatacaatgttgcgccgagttgtttgagcagttgcatatttgaccgtgccacccgggaatgacgcaagtcaccacagatgacgacttttaagcctacaaagtggccgaactcttcgtgaatcgtcattaaatcgagtaagcattgggatgggtgttgcccactcccatcgcccgcattggccagtgccatgtggaattgatcatctgcgagtaaggcgtcgtaataattattctgagaatggcggacagcaacgaaatcgacgccaatggcttgtaccgttttgagcgtatcgctgagggtctcgcctttggaagtcgaactcgtatcggcattgaagtctaagacggtcatgccgagtttgcgttctgccatttcgaaactcgtatgggtccgtgtgctattttcaaagaataggttcattgcgtagaccggccgagttaatttgcttgtcgcgccctttttaaaggcgctagcgcggttgatgagacctgcgactaaatcattggtgagttgatcaacggaaaccaacgcgttatgcttttgcattttgttgagcctccaattcaagttcgctctttgctttatccggtaaaacaaggtttaagacaatcccaaggacggtggcgatggctagccctgagaattggtattggcctaattgtaagtaggcattgccaatcccgatgacgaggattgatgaaccaatcattaagttgcgtttcttatcaaaatcgacttgtttgtcgattaagacgcgcaaaccgcttgaggcgatgaccccgaagagtaagaagctaatcccaccaattacgggtgtggggatgctttgaatcaacgcgctcagtttgccgatgaagccgaagatcatggcgaagaatgcggcgccacctaagacccagacactgtggactttggtgatggcgaggacaccgatgttttcaccataacttgtgacgggcggtcctccgacaaaagcggcgatgattgaggctgtcccgtccccggctaacgtgcggtgaagaccaggatctttaaagaagttacgcttggtgagtttgtttaagaccataatgtggcccatgtgttcggtcattgtgacaaaggcaattggtgccatgctgagaatcgcgccccagtacagaccgggtttgtaagtgacaaatgggacttggaagtctggtactttaaaccaaggggcgtccatcacgggttgaaaatcgacgatcccgaacaagacggcgatgatgtagccagcaatgatgccgagcaagatggggactaagctcatgaatcctttgagatacatattaaagccgatggtgattaacaacgttagtaaagcgactgcgaagaattttaagtcgtaattcccgtgggcattgatagtggcttgtttggcagctgtgccagcgagtgataagccaatcaccatcacgattgggccgacaacaatgggtggtaaggctttgtcgatccagtcggaaccaatcagactgactaagattgaaacgattaagtagactgccccaaccgccattgtcccttgtgcaatcccaggatagccagtcgttttcattaaagcgagcattggcacgatgaatgagaaactcgaccccatgtatgctggaatcttgcctttggtaatcaagaggtacattaaagtgccgaccccggaactgaataacgcaatccctgggtttaaaccgactaagattggcactaggacggttgagccaaacattgcaaacatatgttgaatggataaaccaatccatttaccggtgctgggtcgttcgttgacgtctaagaccgcatcgggatttctaaattgtgtagccataagtatttcctccatgtcgacgactttttgaaccaaaaaaagacacacgctccaacagattggtaggtgtgtcccttgacggacttaggcccctttttttaggcgcactaagttcaagacaaacccttttgctctctctggagacaattaaacggttcagtcgttatttagttagtttttcgatggtaatcccatcatgttgatcaatttcttccatcgcaacgcgaatttgttcgttgagcgcggttggaatatttttaccgacaaaatcggggcgaattggtaattcacgatgaccacgatcgactaagacagccaatgaaattttctttggccggcctaagtccattaaggcgtcaagcgcggcccgaatcgtccgccctgtgtaaagcacatcgtcgattaagatgacatgcttatttgtgatatcaacgggaatatcgctcccgttaatctgtggttcattttgtgtatcaagatcatgttgatcatcgcggtataacgtaatgtctagtgtaccgacgggcaatgcgatgccttctaattgttcgaggcgttctgcaatccgttgggcaataaacacgccacgggttttaatgccgacgaggacgagatctgaaatccccttattctgttcgataatttcgtacgtaatccgagtaaagacccgtttcattgtgttactgtcgaccacttctttgaccatcgtaaagactccttccaaacaaaaaacctctcaaaccgataaggtcgagaggttacagttagggactccgcgtctagtggtgctttcaccgtaccttctcggcctcacgggaccgattttaaaggcttctattaagttagacctagcttaacggagaatccttgatttgtcaatgattttcacgtaattcggttaaagttttctcgaagattgcgggtaatggggcttcaaagcgcatcatttcgcccgtcgttgggtgcttaaagcctaatacagcagcatgtaagaactgaccatgcccagctaaagttttgcggggaccataaacgggatcgccagcaactggccggttaatataggctaagtgaacgcgaatttgatgggtgcgcccagtttctagtcgacatttgattaatgtgaagtcttcaaaccgttccatgaccgtaaaatgcgtgaccgctgggcggccatcttcgacgattgcttgtttcatccggtcgacttttgaacgaccaatgggtgcatcaatggtcccctcgtcttcttcgatgttgccgtggactagcgcgatatattcacgtaagttttccttagctttgagttgggcggataaagattcgtgggcttcgttggttttagccaccatcaaaagaccagaggtatctttatcaattcgatggacaatccccggccggaagacgccgttgatttcagacaatggggtgtgcgccaataaagcgttgaccaatgtcccattcgggtggccagctgatggatgaaccaccatcccttgtggtttattgactacgaggacttgatcgtcttcatagacgatatcgagcggaatatcttctggggttaagtcgagcgtgacagggtctggaatattgacggtgacgacatcccctgttacgactttgcggttactcttacaaggttgatcattgacttgcaccaagtcttttttcaaccattgctggatttgtgaacgtgagtaatcgggtagtaattgggtgagcgccttatcaatccggcctgtttcagttgtaatcgttaattgtttagtttcagtcatgagtcactttctctttcaacaaaatagcaataaagacgcagatgacgcctactgttaaggcaacatccgcaacgttaaagatggggaaattaataaattcgatttggaacatgtctacgacgtacttaaggtggagccgatcgatgaagttaccaagtgttccggctaacagcaacgttaaaccgatccggtaaaatttttcagtgcgatcagaggtataaaataagtagccaattaccccgagggccacaatggtgacgaggtagaaaaaccactgttgaccggccaagatactccacgcagccccatcgttttgaacatacgttaaactcagtacgttcggaataacgggttgggttgctgcaaaggcaacatgggcaacaatccagctttttaaaagttggtcaccgagtacaatgactgcggctaaaacgatatagatgagcatgggaacctcctattcatacaatctaccattgtccttaaaatcggctgacttgtcaatcagttttcgagatgggcgttaggatattggaaaacgtgcttttcaagctaactttctgcgcttaaccaaatttgccaaatcgccgattgtatcggcaattcgtcaaattctattaatgctcagaagctaaccgtttcaaacgcactctagaataatccgctaatcaggccatcttctgtgacgtccatgttgagggcggctggtttctttggtagacctggcatggtgaggactgtgccggtcattgcgacgatgaagcctgcgccaagctttggaatcaattcacggacgtgaacggtgaaatcagttggtgcgcctaatgcttttggatcgtctgagagtgaatattgtgttttggcgatacagactggtaagtggtcccagccatttttttcgatttctttcagttggttgatagctttgccctcgaaaacaacctctttaccgccatagatgtcagtgacaattgtggttagtttcgattgaatgtcggcgtttgaatcatataatggttggaagtttttaggttgatcgagtgcttctaagacggcctgggctaaatcaaggccacctttaccaccatgtgcccaaacactagctaaaacggctttgacacccagttcagcacatttttcttggagcattgtaacctctgcttcggtatcacttgtaaactcattgatggcaacgactacgggaatgccgtaacgttgcatattagcaatatgtttggctaagttactaaaccctttgtctaacgcaccgagattttcagtggttagatcagctaaagcaacaccaccgttgtattttaacgcccgaacagtggcaacaatcacgatggtatccggagtcttgccaagttgtgggactttgatgtctaggaacttttcagcacctaagtcagcgccgaagccagcttcagtaatcgcaatatcacccatttttagggccgtttgggttgctaaaatactgttacagccgtgggcgatattggcaaatggtccaccgtgaattaaggctggtgtatgttcaagcgtttggacgaggtttggtttgagggcatcttttaaaagcatcgcgattgcaccggtgatttcgagctcgccaactgtgacgggttgccgatcataagtgtaaccaatgacgatttggctaatgcgccgcttcaagtcagtaatgtcagttgctaagcagagaatggccattaattcgctagcaacggtaatgtcaaaaccatcttggcgcggcatcccttgcactggaccaccaagtccaatgacaacttggcgtaatgcacgatcattaatatcaagcgcccgtttccaaataattcggcggggatcaatgttgagggcatttccctgttgcagatggttatcgattagggcggctaaagtattcacagcagcggtcaatgcgtgcatatcccctgtaaaatgtaagttaatatctgccattggtaccacttgggcatagcccccaccagttgcgccacctttcatccccatgacggggcctagtgaaggttcacgtaaagcaatgacggctgattgatctagttgacgaagggcgtcgccaagaccgacagtcacggttgatttaccttctccagctggtgtgggattgattgaggtcactaagatgagtttgccatcttctttttctttcaatcgattaatggcagcgaaattaaccttcgctttatacggtccatattgttctaaatcagcggccgttaaaccagcttgttcggcaattgccgtgattggctgcatctccttagcttcattttcctgtgctatttgaatatctgacataccgcccagctcctttttatttatgatactacctagtatagctgattacgtacggaattggcagatgggatgcttaaaaagaacgatattcttcgacacacttctttgtacgtggtaaaatgagcgcgtacgctgattaacatttcaaggagggattgtgatggaacgaggaatcgttaagtggtttagcaatgctaaaggttatggcttcatcagttatggagatgacgaggaggttttcgtccattttaccgcaatccaaactgacggctataaatcattgaataaagacgagccggtattatttgagattaaagaaggcgcccgcggtttgcaggcagctaacgtgcaaaagatagcagaataaaaatacgtttaaacgctaaaaaagagccacgacaagattaatgtttgtcgtggctcttttttatttaactattcttcaattggccaaccattttgtttcagttgttcaacgaatgcctgcttggctttgcgactaaggagtatttgttcgggttggtaatcaagttcgttggttttaattaataaaccatgtttttggacaataatggtcgtagtcgtttcacggttgatggttcgattatatttaaataccggccgtttaagcgtgatcacgtctgccgtcattgaaacacgatgcccgaaaatgacccatagcgtcaaccaaacggcaattaagccgatgccccacgattgccagtttaagttgatgagttcaagttgtacaattaaagctaatgtatagacgaagccaatccaagaccaaatcgtcacgaagtaagcataatttggttggtagaatgcggtggttgtcttttgcatgagaacactcctttttacgctttgtatcataccattaacctgaccctgctgtcagtgaaaggcggtaaattttaagaatgattaaactttatacggacgcagcaactcgtggcaatcccggaccaagtgcggcgggaattttaatcgtgacaccagagcgacaatatcaactacaagcacctttgccagaacagtccaatcatgatgcagaattttcggcggtcattcttggcttagaacaactagccaatcgggggcttaccacgaaaatactacagattaacgttgacagcaagcttgtctttcagagcctagaaaagcggtatgctaaacattatcaagctgccgtcgaccggattctagcacttgaggcgccctattcaatggtcatccaccaatggattccagagcgtcagaatcagggggcgcaccatctggcccaacagggattacctcatttaactgactgttgataggcttaactagcgctttgagcgtgattttagtaaaataataagcaacgctagaattttggaggagtacgatatggttttagttacagaaataatgtcattcatcatcttcattaatgccttattggcaattattacaattctgagacagccccgcgatattgcggccacctgggcgtggctgctagtcttaattttactacccgtgggcggttttatcctatatatgtttaccggacggggcttatcgcggaaaaagattttccaaagtcaatcgcaaatcgatgatgggctttccgcattggtcgacattcaacgtaaggaaaatcgtaaaaacgacctcttaccgaaaaagatgctttccagtgaagcatccgaaatggtgaatctctttttaaatattaataatgcacccgttttaaagaataaccatgtcaaaatctatactgacgggcaagcaaagtttgacgccctctttgccgacatcaaacaagctcaaaaaagtattcatatcgaatattatacgatctataatgaccgattgggcaatgagttacaacaactattgattcaaaaagccaaagaaggcgtttcagtcaacgttgtctacgatgcttggggctcccaaggcgcaacgcaaaaatggtggcgcgcacttgaagatgtcggtggccacgcgcgaacgttcttcagttcaaaacacacgattaccgattttcgcttgaacttccgtgatcaccgtaagattgtggtaattgacggtaagattggttatattggtggctttaacgttggtgatcaatatctaggccggagtaagaaattcggacattggcgtgatacccatatgcggattaccggcaatgccgtgttagccttacaagtacgctttatgatggactggaacgcgagtgttgagtctgcgattaagttaacttactcggaagaactcttcccagtggaccaatcccaaaatcgtggatcagcagccatgcaaattgtctcaagtggtcccgataaattagatgaacaaatcaaactcggttatctgaagatgattagtaccgctaagaagcgtttatggattcaaacgccctatctagttccggatgatagtattattgatgcgttgacgactgcggcaatgtccggggtggatgttcgtatcatgacgcctaacatgccggatcaccccttcatctaccgtgcaacagaatactacagtcaactcttgcatgcagctggcgttaagatttaccggtatgaagatggattcttacatgctaagacggcggtcatggatgggcatatcagcactgtaggttctgccaatatggatatccgtagtttcaagctgaactttgaagccaatacgtttatttacgatccgaaagttgcagcgcaacttgaagcgatctatcaggctgatatggaaaaagcatccctactaacagacgaaataatcgcccaacagtcaacttggttgaaatttaaacaaaaattttcacggttactttcaccaattttataaaatgttcgttaactcatttttatgatggtgcaatattaaattaatcccaatctaaaaaattttttaaaatctgttaagctttgtccggcgtgcttttgaaaaattttgcgcattagcagggattgactttacccataaatatgtttaacttaagtacaggacgttgcccaagacaatcaaatgaacattcgtaaacgaccactataattagtggtcgttttttgttttatctacaatatgtggtgtttattgattgcatcttccatttcaaaacggtatactatttttatcgataagagaaatacaagggagttaacgattatggcaaatatcacattatatactaagaacggctgcccacaatgccggatgacgaaacactttttagaaacgcacaacgttccttttgttgaacataacatcaatgacgaaccacaatatattgattacttgaaggaacaaggtttccaagccgttcccgttttagaagcggatggcctagaaagcttctcaggttttagaccagcggaattgcaaaaattggcgatttaagcaccatgcattcccagttttaacgggtgaggccgactcttgattactaaagagttggtcttcactttttttaaaccctaaaacagctaatatgactagaaagtggtggcaaggatgtctttaaaagagattaaaaccgaagatgtaacatactatgaattgaataaccaaattaatattccagtgaatggtcaaattccattacaaaaggatcaagaagcactcgatgcctttttggaacaaaacgtacaacccaatatggtgacgtttaaatcacttcaagatcgtctagattatttagtcgcggaaaattattatgaagcagattttttgaaggcttattctctttcattcatggaagaattgaatcaatatttaaaggaccaagacttccacttcaagtcatttatggctgcttataagttctatgcgcaatacgcattaaaaacaaacgacaatggcttttatcttgaagattttaaagatcgcgtttttgtgaatgctctctacttcgcagatggtgatcaaacccttgcgctgcaactagcggatgaaatgatccaccaacgttatcaaccggcaacaccatcgtttttgaatgctgggcgttcacggcgtggtgaattagtttcatgtttcttactccaaacaaccgatgatatgaattcaattggtcggacgattaactcggcacttgaattatcacggattggtggcggggttgggattagcttgtcgaacctccgtggagctggcgatccaatcaaaggcatcgacggtgcagcaagtggtgtcctacctgtcatgaagttattggaggattctttctcatactcaaaccaattaggtcaacggcaaggcgccggcgtggtttatttaaacgccttccatccagatgtgattgctttcttaggtgctaaaaaagaaaatgcagacgaaaaatatcgtttaaagaccctctcattaggcttagtcgtccccgacaagttctatgaattggtgaaagctgatgctgatatgtatttattcagcccttacggtgttgaaaaagaatacggcgtacctttctcatatgttgacatcaccaaagaatatgacaacttaatcgccaacgataacatcaagaaaaccaaaattaaagcccgtgatttagaaaatgaaattagtaaattgcaacaagaatcaggttatccttacatcgtcaatgtggacacagccaatgctgcgaacccaattgatgggaagatcatcatgagtaacctctgttctgaagtcctccaagtgcaaaccccgtcacaaattaataaccgccaagaatatgacgtgttagggacggatatcagttgtaacctgggttcaacgaatattccgaacatgatgacgtcacctgactttggtggttctatcgaagccatggtgcgtgctttaacctacgtcacagatcattctgatattgatgtggtcccttctgtggctcatgggaacgaattggcccacaccattggtttaggtggcatgggtctgcataccttctttgccaagaaccacatgatgtatgggtcagaagaatcaatcgactttaccagtaattatttcatgcttttaaactactggacacttgttgcttcaaataagattgctaaggaacgtcagatgacctttgccaactttgaaaagagtaagtatgctgatggtagttacttcgatcaatacctcactgaagactgggcccctaagacggacaaagtcaaagcgattttcaaggacattatgattcccacaaaagccgattgggaagctttaaaactagccatcatgcaagacggtttataccatcaaaaccgcttagccgttgcaccaaacggttcaatttcatacatcaatgatacttctgctagcttacaaccgattgttaaccggattgaagatcgacaagaaaagaaaattgggacaatctactaccctgccccaggtctttcaaacgataccatgccatattatgaatcagcttatgacattgacatgcgtaaagtcatcgacatctacgcagcagcacaaaaacatgtcgaccaagggatgagtatgacactcttcatgcgttcaacgattccagcaggcctttacgaatggaaaaacggccggactgacaaaatgaccacccgggacttaaacatcttaagaaactacgcccaccacaaagggattaaatcaatctactacatccggacttacacagacgacgaaagtgaagtcggcgcaaatgcatgcgaaagttgtgtaatctagagtgcgtttgaaacggtttgactttgagcattagtctaactcggcgaataactgcttataagcagttattcgccgagtgtaactaagcgcagaagtcagtttcaaaaagcacgtttcaaaacagagtgcgacggcaggcgtttatattttgagcattagcatagggaagcgaattagcgaagtagtcgatgatttgattcactgggctaagcgcagaaagttagcttgaaaagcacgtttcaaagcaaacaccaaatctccactccagctgctcgtcagctggcctacatacctaaaaaagaagcacgttaaaaggagttcatgaacatggcagaaaattatattgcaattaactggaaccaagttgaagatcaaattgataaagcaacctgggaaaaattaaccgaacaattttggttagatacgcggattcccctttccaatgacttagatgactggcgcagtttaccagacaatgaaaaatggatcgtcgggcatgtctttggcggtttaaccctacttgatacgctacaatcacaagatgggatggccagcttaaaagccaatatccgcactcaacatgaagaagccgttttaaacaacattcaattcatggaatccgtgcatgcgaagagttattcatccattttttcaacgttaaacacaccaactgaaattgatgaaatcttcgactggaccaacacgaatgaattcttgcaatacaaagccaacaagattaacgatatctatcaaaacggcacaccattgcaacaaaaaattgccagcgtctttttagaaaccttcctcttctattctggtttctataccccactctattacttagggaacaataagttggccaacgttgctgaaatcattaaattgattatccgtgatgagtcagtccatgggacttacatcggctataagttccaattagccttcaatgaattggataagtcagaacaagaagaattgcaaaactggatgtatgatttactgtacgacttatatgccaacgaagaaaaatacacccacgaagtttatgatggcactggttggacagaagaagtattaacttacctccgttataacgccaacaaagccttaatgaacctcggccaaggcgccctcttcccagatagcgctgaagatgtgaaccccgtgatcttgaatgggatgtcgacttcaactgccaaccacgatttcttctcccaagttgggaatggttatcgcttagggaatgtggaagcgatggaagatagtgattacgactttgattaattaaatgcaatagcgcgccccactaatttaagtgagacgcgctatttttttggttattttttaaattgtttcagatatcgtccggccaataatttatgaaacttaacgcccaacgtcggatttgaggcatcaatatcggcatacatcgccgttgtaatcttgttgagtagtggcactaactggtcgagttctgcctcggtcaaggcgttcacaaacggtggcacctcttgattggcagtttcaatttcttgacgaccggcatccgttaagttaactaaattaacccggcgatcacttgggagcttacttaacgtcaccagctcgcgtttagcgagtttagcgacaaattcactggttgattgaggtgacattcccaaacgcgttgctagttcacgttgcgataagtgatcttcatcagcaagtgccaatagaatcttcccctggccttcgacgattaaatgcgggcgtgcttgtttaacgatatcatcgtagatcttactgagttgttcatattcagctaattttccggcgaccaattcggccttgacactctttgccatacgtcatcttcccttcgctgttttaattagtatacaccattccaaaatctaagagtagcaatccttgacattttaatcaggtgacctgattattaaatgaggaggcaatattatgtgcagtgagcatgtcattgaagtaaacaatattcaaaaagcatttgggaccaaaaaagtggtgcgttccgtttcgctagccgtttctaaaggtgagattttcgcattattagggcccaatggtgccgggaaaacaacgctcttaaaaatgatgaccaccctcctacgaccagatagtggcacaatcacattaaatggctttgatacgataacacaaagccgccaagtgcgccaacagtttagtgtcaccaatcaaacagcggcaatcgatcaagacttaagtgcgcgcgagaatctccgcttatttgggcggttaaatgggctcagtgccaaagcgagtcgaacccgagctaacgagttactgacggactttgatttggaccaatcagcggatcaaacattggcgactttttcaggtgggatgcggcgacggttggacttagcggtcagcttagttggcaagccaaggatcctctttctcgatgaacccaccactggactggatccaagaacccggacgcaaatgtggcatgcgattcaaaaattagtcgcggatggctcgacaatctttttgacaacccaatacttagaggaagcggatcaatatgcggatcggattgcgttgattgatcatggccaattgattgccagtgggacacctagtgagctgaaagcgcaagtcggtggtcagcagttgcagctgacggttgccaatcaacaacaagttacccaggctcagacgatttgcgagaccgttttgcaacagcccgtgcgtgtgacggatcaaacaatcattggaccgttagtgcacgatgatatgggcgtcatcaccgcgattttaaatcaatgtcagctggcaggcatcaccatcagcgatttacaattgacagccccatcgttagatgacgtctttttgaaaatgaccgttggtaaaaactaaggagataataacatgctacaaatgaaaacaaatacgcaagtgttgcgcaatagcttaacgttaacccatcggaatttactgaagaccttgcataatcctgataatgtcagtgatgtgctggcgccctaccgctaattttggcgcactcatgatggcgttattcctagctgtctttattggctggtcaacgtcgtggattttcgccttagtcggtttactggttaaaaatgtcgaactgattagtagtttatcgatgatcatcattctggtattgaccttcttatcgaacgcctttattccagttaaaaccttaccgcattttctacaaaccattgtccgcattaatcctgtcaccacaaccattacggcaatcagaggaattttgaacaccggtcattggagcggaaccgcaacaatggtcctcgtcagtggcgctgtgattattctggtgtttatgccactgacagtcatggcgtatcaacggcgtgactagaataaaatagcgcgccgcacttgtaagatagtgagacgcgctattttagtttaaattacttggtagtcgatttgatcaatcttgattttgggtaattcatcaatattcttgtctgtaatgatagcgaaagagacatacgcgcgatcattttcaggaagctcttcgtaagtgatcgtgccgtacgcaagtttaaacagcttagcatgcttacctacttgatctttagcgattgcaaacacatttggctggtcaaaatacgtatttgtagtttgttctttgccaccttcaagatagtgtttcatagcagtggcatccttgatgaacccttttacagagtttagcactaaataatcgttaccgacgcgataaatataaccagagactttcttttgattcgaatgagtcgtagttgttaatctgattgttccatgtttaggtaaactagtcccttttttagtctgtgttttggatggtgtatgtgtttcaatggaacgattgcaaccagtcataaaaaacattgtgatagatagtaataaaataaagactggcattatttttttcatagtgattgttttctccctgatcattgaatttgataaattggatagcgattgtagagcgggtcgtttagattggctgtggcaacaatggcttgtagtgtgaagtcgcgtggaatgcccactgtgaccatcccatagccaaagtcttggtgtggtttaaactgattatcggcaataaaaatgaagccgtcttcgtccagtttttgataggaatcgtgcgctagtgtttgcgtagttgtttgactcaaaaacgttttgagcttatttttcgtattcagttgttcattcggttgatgcgcaatgacgaaaaaggttttatgccggtaagacagccaataggcttggacatcttttttgtcgtaagtctgttggttttgtggacgcaccgtttttttctgcgaactatgctgaggcgtcgttgtttttgcaggatggttctgacaggctgttagtcccaataatgcaacggtcagcgtcaatgttagccagagatgcctgattttcataagatcagtccttcacagtttagtttaccccctataattataacagttacgcctactttgactagtcttaaatattaagttttatcgaaaaacgataaaaattaattgtttttcaataaaaaacgattataataaaactattcttaaaaacgaggtatcagatgaatgttaaaaaaatggctacttagaatggcattactcggaattgcggcggtatttggtctgttaagtttgttagtgacgatccaaattgtgaccacgaaacacttagaatacccagcgacaatctggatgttggcgattgctgcgtatggtgtgacggctagtatttggtttgcattaatcaagttggcgcagattctccgcttaattgagcaccatcaagtttttctccctcagacgctacgatatgtatcagcaattagaaaagcgattttggttgcgagtttgacggccctttttgccctaccctttttctaccggattacgcaactcgaagatgcaccaggcttgatgttgctggggttaggcctggtcttcattccgtttgcaatcctcattttgatgcagattgttgaagatctttttaaaagtgcaatcgcctttcaatctgaagtcgatttaacggtctaaggaggaattcaatggccattcgtgtgaatttagacgtaattctcgctcaacggaaaatgagtgtcacggcgcttgctgaacaggtcgatattacgattgcgaacctttcgaatttaaaaaccggtaaagccaaagcaattcgcttttcgacgctcgagaagttatgtcgcgtattagactgccaacctggtgatattttagaatatagcgatgattaatcctgcggcccccttttatcggggaccgcttttttaatgcttcagtacactggttgatgcgatatgtagtataataaatccgtagtgattatgaaaggggttttatgctgatgtattacgttgtgatgaagtcaaatgatattcgccgaaacttggcaaccgaacaatatttaatgaatcaaaaaaatttcgatgaaccactcttactattctacattgagaaaccatgcattatcgtgggccgcaaccaaaatacgtatgaagaaatcaatcaaaaatacgtggaagaccatgatattacagtcacacgccggttgtctggtggcggtgggatttatcaagatctcggtaacctttgtttcagtttcgtggtgaacgcagattctgaacaattcggtgatttcaaatccttcacgcaaccaatcgtcgatgcactccatcaaatgggcgccacaacggctgaagtttctggtcgcaatgatatgttagtggacggtaaaaaattctcagggaacgcgatgtacaccaagaatggtaaaaccttctcccacggcaccctttcatgggatgttgatttagatgttttgacccaagccttgaatgtccctgcagataagattgtgtcaaaaggcattaaatcgattcgacaacgcgtcacaaacctaaaagggcacgttgaccctgaataccaaaacatgtcgacagaagagttcagagacgtcttattactgaacttgatgcacgccgatcaactagctgatattgccgaccgcgaatatcaattaacggccgcagacgaacaagccatcgataagatttttaacgatctctatagcaattgggactgggtctatggcaagtcacctaaatcaacgattcaaaaacgcaaacacttcgatttcgggacgattgatgcgcgcttgttaatcgaaaatgggaagattgccaacgtcaagttctacggcgacttcttcggttccggcgatgccaacgaattggctgaaaagttagtcggcacggtttatgaccgtgaacatttagcaagcactctcgaaccaatcgacaccacgtcctacttcacagggattccaaaaacagaattagttgaattattagcacaatagtaactagctaaaaagagctactaccaaaataatcttggtagtagctcttttaggttaacgtgcaaatcgtttaaaacgaatcgtcatgcgtctggtttgcatgaagtgttgacaaataccagcaataactaatgggatgaggatgcctattaccccactaatccagaaaatcggttggtggaatagatttgcgagttggttcattggttgatcaccaggaatgttcaggacaaaagtatccacccagcttggtaacatgcgttcaatcgctggttcaatgtagtgttgatagagtgtcgacagaattagccatgcagcaaataagaaaagccaagctttacgttcaaataacgtaatgaaactgctaatggcaatcccttctgccatgatggtccagatgagtacaatggccagcaggacgaaacggctatcaagaaagaagcgattaatcccactttggtgggcagcaatgaagtatgtgccgccgtagagtgctaggaaactaatcaattgactgctgaagaggctaatcacttgggtggtataactaatactgcgcggaatgccatttagaatcccaaaattaaacggcttgcgggttgtcgcaaacgaaaggaaaatcagaacgagttggctgacgactaaggaaccgctcaagagcgtgaaccaaaaggccttccaggtcatttggttggagaagattaaaatggaaccgcctgtgatgatgacgaagacggcaattgccattaataagccgcgccaaatcgctgctaggcggtaccgcatcattgcattaaacatgtgcttcacttcctttgttcgttaatttaatgaaagtttcttgtagatcgatatggtcaatcgttagacgatctggaataacccgttcttctggtaagacgtcataaagataaaccgtgtataaggtccccatttgctgggaatctaagacgtttaagtcggtacagtactcgcgaacaagttcttccgggccactgacacggtaactcttggcgaggacggtttccaaatcatcatcgacaattaattgagcgtcgttcaagaccaagacgtgttcgactaaggtcgcgatttcttcgatgatatgggtcgcaacgacaaatgtccgtggccgactttcataggcctgtaaaatgtagcggtataagaggctgcggtagttagcatctaagcctaagactggttcatcgaggaaaacatattccgccggcacacaaagcgcaacaattgttttaaaaatcgtgcggtacccagttgaaagctgattgagtttcttttttggattcaaatcaaatgcagtcagcatttctttggcgagtgcatgatcaaatgaaccttgcagtaaggcggtatttttaataatggtccgcaatttgtcatctttattaaagagattgatttccgacatcaagtaaatcgtttgtaacggatgatcgcgaccggttaagaccgtatcgccccatttaatctcacctagggatgcagtttgatgattggctagaatacttaataaggtactcttacccaccccattgcggccgagtaagccgtaaattgtattgggtttaagtgttaagttgatgtcgtcgaggacgacctgtttcccaaattgtttaatcagttgtgtggtttgtaaattaggcatggtcataacccctttcaatcagtgcaattaggtcgtctttggttagatttaattgttgtgcttcagtgataaattgggcaacatagtgttcaaaaaattcagattgccgtttttcagtgatctgtgcgggtgcgcttgatgtgacgaacatgccgagtccccttttcttttcgattaagccgctggtaacgagttgattcatccctttgagtacagtggctggattgatattgaattgtctggaaatttcagttgtcgatgggacttgactaccaggtggaaagaccccagtaaaaataccctcttcaatttgttcggcaatctgccggtagagtggtgtatcattattaaattcaaaaagcatccggaacacctccgtttcgttaattggttagttacttatgtagttaactataatacgtaggctgcgaaatgtaaaccgctcctcaaaaacatttgattattcgttcatattcacctattatgtacttataatcaaatgttttcagagaggatgagaacgatgcagacagcctattgtttcattgatttagcggatagccgcacccgttttacggaacaagcacagacactccagttattgcaacacttcgccgacacgttgaatcaccattttccagcgttattaacaccatttgcaattaaggatggtgatggtctattgggcggtttttcagcggatgaccaggcacagattgttgatgtctatcccttttgtaatgcctatttaaagagtgacgcttttcaaactttctggcagacacattttgcggggctggcggagcccactttttattttggggttggcttaggaacgatgactacgccgagtccaagtgactatcaggatatcaatcgggtcaacgggacagcaattgtgaacgccctcgccgcagcagatcaagccaaactgttgcgtcaaggtgctgaattagcacaaggttatccctttatgacgacggcctttcaatttcaattagtggcagatcaaccagccgcaaatgggattaatgccctcttttatttaatttatgagcaactcttgaatacgcagttgcgcaaggacgcttttgctgaaatcgtgcttcaaccaacattgaaacgctatgaattagcggaattgttgtggaccaaatacggcgttgcttcctatgaactagactacagtgatcaaaaagggcgtgcattagcctctagtaaagtcagtcgcttactgaatcagattcagtatcccttgattgaacagaccctggcaacgttgcgcgcgcaactgatgacctttaaggaggcagtcgaatgaacctctttgcgcttttcttgcttagtcatattggctgcgactttgtctttcaatctgatcagatggctcaatgcaaacgatcaacgaaactcggtgtgaaatggtggccattatgcaagcacgcactgacacaagtcccgttagtgcttattttatggggtggcggttggttaatggcaccacctacttggccacattggcaaccgttactaatcggcttagtcatcattgtgatgagtcattggctcattgatctatttaagcaaaatagccagccacttttaaaagcacagctacatttaaccagcaatcgcgtaccagtgatgagttataccatcgatcaagcactccatttaatagtgatcggtcttgtgagcatgttcctcggccagcaatgggcgtttaaccatgtgaaccgattgttattggctgccagtattgttttgagcacgttattatttgccgattatttcattagcttctatttaaaaggactggatttaaacatggatcgcctgccagatggtgcaaaactgggtcggcatattggtcatttagaacggtttgccatcttaatcttgttttacacgcacaatgttgcgagtattgctgtgattgtggcgattaaggcgctgacccgctttaaagccattgaatccaacgaacaccacttcgccgaatattacctcattgggagtttgctcagtctgatcttcggctgtcttggcggttatctattaagtcttattgcgcattaaaaaagtgccacagaatcaggatttttcctgttctgcggcactttttatattattcagcgatgattaataatgatttaatcgctttgcgttgatccattgcttcataagcggcttgaatatcatctaaggtaaagcgttgtgtaaagactttaccaggattaatggcaccctttaaaacagcatccaataaacgagtgcgatcatgagtcgttacggcagcaattcccccacgcaaaccgatgttcttccggaataaggcattggtgttcatctctgctttttggggaatgccgacacgaccaatgacagcccctgcgccagcaacggcgacggcagtggcgacggattgttcggtcccgacacattctaagacggcgttggccccagcgttgtcggttaacgccatcacttttgcgaccccttcgtcaccgcgttcagcaacaatgtctgttgcgccgaattcaagggctaatttttgccggtccgcatgacgactcatcgcgataatccgtttcgcaccgagtaatttggcgccaatcacaccacataaaccaacggcgccatcacccatgacaacgactgtgtcaccgggtttcacttcagcggacacggcagcgtgatagccggttgccatgacgtctgaaagcgtcaatagattattcagcatttcatcagagtaatcgcttggttggccaggaactttaacgaggccccagtttgcattgtgataacggagatattcggcttggtagccaccaggattattctcgcggttggtacaatcgccatcaaaaccgtttaaacaagcggcacagtggccacaaccatgggtaaatggcacgatcacaaaatcaccgacactaacattttgtacgtcagtcccaacagcatcaatgatgccaattgcttcgtgaccggtgaaaccgcctacttctcgttttgaaatcccacgataccaccataaatcagaaccacagacgcacgcgcggataatgcgcacgaccgcatcggttggtttttcaatcgttggttttggtgcttcggtaatggtcatttgaccaggacccataaaagtagctgttttcataactataatctcctatctcttcctattatattgtctttactatacaccttagacctcactttaatgcaagctttttttaaagtccaatcgccagttgttgtttcttgcttaacacttcgtcttgggtaatcccaatataatggagcgtcgtttcttgcgttgaatgaccaaaatcaatcatcaatgaccgcacgtccccgaattgtttgtagaaccagtagccgtaagttttgcgcatcgtatgggtgccaatatcattacgcccaagtttcttacctgcttcagtcaacatgcggtaaacaccgttgacggtgatgtggttatcgccgacgcggctaggaaacaaccaatcattgcctagcaattcattattttgaatatagggactgatgtatgggcgtaaactcgccaaactaatttggcgccacttacccgttttttgttcaacaatcacgggattgtcttcgatcacatctttgacttttaactgcacaatatcagaacagcgtaagccagtattaatgccgagtaaaaataataaataattgcgactacccatttgtgaatggcgcaagatgactttcatgtcttcaatctcatcttttgtccgtaaaggttgaacatttaattttttgccttttttagtgcgcgatttccgcatgttttttccgcctttttgaccgcattctttttctctatatcattataaaccatgcggtggtattttgcacctttgattatcgttgatttaaagggattccgagcgcattctttctaccaaaggaatgcgctcaaacacattaaaggctattgatggctaaatcacggtctaatcacgtttataaacgatcaatcaccagaggcgcattttaaggacgtttcagattagtgagtggacaagtggtcgcgaaacttgcttaaaatgcgaattaaaaaaggccccttaaagtcacaaaaaaaacagcgttaagacaaaaagtcctaaccaaagtaattactccctatattggttggaattagctactaccattgtaagtgattgctttgggctttttaatttctgttcggattaattatagaatttgccagataaaaagaagtgtgattatggcgctacaaaaaactatcaatgtattacgcgctaggggttattttcaccacataaaatcgtccatattatgactatgtttgctttttcgtagcgaacttgtaaataatgtgatctaattaaatttatatattatgatcgtccctctgaacgcttagctgccaacaatttattattttcgataattgccgccccaacaactgctattcgtttcttcatactgaatacctctcacgtcatatgtttgtattcattttagcagtattgtatgaaaaatttcatcttaactaaccttggacaaaaaaagcgaaccacaatggttcgctgcaactaacactattcatctgctctagactttttttgaaaaagctcagtttcaacttcttcaggtaactttcccataaaataatcttctatttgatcccagaaccaatccgtatatttttctacgagttctttcccagaattgccattttctttgtgagtaaataagaaacgctgcataagtacgccaattcgatgcttcaacattacatcttctagtataaagtttctgtatttttgatctgctttaatggcctgttctactggataaaccgaattaattcgaatgtatatttgaggattatatccgccgagagttgtgtagcttcctaattcaaaagcttctccaattcccaaaactatcatttcttcagaaaattcttcagaattcctatagtggaatatattcattgagccttcatcctcaaagtaactgtacttgggatgatatatcctattagtaactccactaacaaaatcataaaaaatgtctccagatctgataaccccaaagcgagtcttctccccgacaactcgctctttcaaaactttcacatctttgagtttttgatactcaaaagttgcattgataagaacttgcgctaagcttcttgctttaaaggggtcgctaatacgtaagttgtttctaacgaattcgcctaactctttagcatcaaattgtttgttagttcgttgtttagtatctaaaaatcgtaagtaagtttccataattgatttatacttagcctgttttgtactattttgatcatcgaactcatattgaacaccgctcgcgaacacaaacagactaaacaacttcgaatggcgtaatttttcacgctcatcaggtgtgtttaatttgtacttaaactcaggaaacgacattttcttataatggtcctcccaaatacctgaaagatctatggacaatacagaagcatagtttcctccatggagtgacgcgacgtattccacataattacgcaacgaagaactttcaagcgtgttctgaacctctttagtagctaagattaattccttaccaaaaatacttctcggtcttgcaacgaatggagagtaacccagcttacggcttgaggaaaaatctttttcaatcatcagcaataccgttttaactttgttgtctaaattgttgttatcatcgtccaagttatccgagaagatatacttaaagtcatcagcattcacgacaatattacgattatttccttttgcccggtatatatctagaactttttgcatcacggcttgaatttgattttttctaatcgcgctcattccctgcaatttctttaccgcgttcaaatcttgaggcagaaaatccaaaacgccaaatcccctgggcacgagttgatgatttcttgcaactcgtcctatttcctgaatgtaatcaacaacattcccggttggattaaagtgataaacatttgtaatgtctggaatatcaattcccattccaaaagcttttgttgcgagaacaaattgaatttctccagttttatactcatctaaaacggcatccttctcttccttagtgagcgtaccgtaatatcggccagtaaccttggctatactaggtgcatttgtttcgacgaattggtaaaatccgttcaacaaagatatcgtaggaaagtacattaacgatttttgtcctctctttgaagcattttgcagatactttaaggcaagaacgttcttcgtcttacgatagtctctatccttatcgtcggcggatgatgataccttcataaaaatatcgtttcgtcgaaccacaccgaaataagcaatcggccggaccatattcagactattgcgtgtatccatgtacatgtcttctctaccaccataaatagcagtagcagtaaatgtaacaatcggaaactgaaattctttacgcagtttttgaagatatatacccaaataccaatagtccgctctgaatgattttccccacgttgttacaatgtgggcttcatcgacaatcaccattccaatttttcgatcgccaattaacatcttaatatcacctcttgcctgaagcgtttcaggtgagaggtacagcatgtcaacagttccatctgctactttttgtaaaatgttctgtttttcatacggaggagtattaccatttattgtctctgcattttcaacgccttttgctttcatgctatcgacttggtcattcatcaaaccaataagcggcgatattactagcactaatggcttatcatcttgatatttttcagttaagtatagtgttggtacctgaaacatcactgattttcctgccccagttgatgcagtgatatacacatcacgatagtcattaccccctcgggcctgctcagcctgttgtacgatatcatctataatttgagcttgtgatattttaattaacttcttatctctcttctcaatcgtggcatacatttctaggtctctgaagtcatcatacccccaaacttttttaagtatctgtcgatattcattaagtctctcaatgtcatttcgttttattgattgtgtagaaaagtaaacttcccagtccggatgtaactccttcattacagaaatacggtgaatatatcgatgcgggatctgatccaacgattcaatcacaaagttaacagagttagaataatcttgttcaatttcaaaatccaaaaacgccgtctcttcttcatccagagccatcgtaatatcggccgttggattagaaaccaactgaggaacaacgtcattttccaatccactgatatcaaataccgggtacccatcccacaaatccgttttatatgatatataatattcgtttgactttttagaatagtctatcccgccgtaaaaggtattaattcgttcaaccttaagtttgtctgttccttctatttctgtatcttcactcaaataaagcatttcatatgctttctgaacatctgataaagaatcatcgtaagggtacttagtatcgaacaaatcattcttaatgacaactttatccttaggatacataacacccacaagttctgatattaaactaaattcttcaggtcgaactatatagtaaggcaaacctttagccatacttgccatggcttcactaaataccttagcttttctatcatccaaatcaattagatcgagcttttgatcaataggagtaatgaaccaattgtcaaaactttcctgaccaaatccaaccaatattaccaatggggtgtctaaattattttcactgatgatactttcaattctgttattaagatccataataatccattctctccacgctactcttccacttcaatccaatctttaatttgttttgcatttactggatttcttaatcgtcgaagcgccttcccttcaatctgtcttattctttctcgagtcactcccattttttgacctacctgttccaaagtatgaatactcgagttttctaatccaaatcgcattattatcacttcacgctctcgatctgtcaattcaagcagtagctcgttcaacctcttactaagctcattatctgacactatgtcaaattcgctttttacatcatcctctggaattagctcacccaaagttgtatcactttcggcagaaccaaccggtaaatccaaggacacaagattgcttccaaatctatattgaacttttttataaccaacaaccttatccacatcaatgttcataaacgccgcaacctcatcatcagttgccggtcgtgataggtctttgaataacttattttcggcattgcgctctttattaagcacttctctcatgtgaacaggcagtctgactattgttgactgatcggctataccacgagtaatagcttgtctaatccaccaggttgcataagtcgaaaattcatatcccaatgatgaatcgaatttttctgcagccctcttcagccccagcataccttctacaatcatgtcatcaaagtcataactagccgttgtttgtcctgtatattttttggctatacttgccactaatttctcatttgccctcatcaatgagtctagcgcccgtgtgctgtctgatttttgatattcgtcaatgtaatttgaattattagaaaaatcaggtgtttctgcgacattcttatactgatcatcaaatttttctgaactcaaaacatcatcaaggtcttcaaagtcatcgaaatcgtcaaaataatcgggatcttcagaaatcacattatcaagcaagtgcccgctatctgatttgctttgaattttggcctttcgatagacaccatcagagacaaatgttatttctcctttgtctctcaattgctgcaaaacttgtctaatcttagccctaacattttgattttcactatgtatctgtcctaaatcacggtcaaataaatatacatccgataatgtaaattcttcaggtaatccttgaagcaaatttttcatgtcatcctgccaagataaacccgcattgtgtataacattctttaaagacgaaggctcatcttcaatgatcaccaaattcatatcagacgcctctttatatattcgatatgaaaaattaagatcattttgggattgcccaataagttcatttattgcgcttcgttttatttcgcttccccatcgaacattatcattcatgtagtcaatgattttttctatgtccatttcacttcacccaaactatttattactccacaaattctattagatcacaaaatttaatacttaactacgcgtggtgctagtttattaacgttcctgttatctacacgattttcaacccgctgatgtgatgcatgagattgtcgtgaaccttgatggtgtgccataaaagcatcatctcaattagggcttcgagcccaaccgctgtgcgaacatgcggatgttcaaatgcggcaaccgtattcaagttattgaacatcgtttcaatatgtcggcgctgtctctttaacagcgttatatcaacgttcaccggttgcttcatgttcttacgcaatggcgtccaaatattgatacctttcgttgaaagttgctgtttcaagtctttacttagataaccaacgtcagttaaaactcgcgatgaactagcttgttctaacaattcttctgcgactctaacatcatgtatggacgctttggttacttcatagcccgccacatagccttcattcgtcatgacacaatgaaacttgaacccgtaaaagtgcaggtgtttagtagcgttgaagccaatgtttgcgacatcgtgaaaaaccttagcctgcatatttctaactggtgcacacaacaatataggcgcactatcaatcacggaatatgcagtatgacgcgtccaacgttgaagcatatcgtttcgaattgtcttcatgtccttagcgagatcatgacaacgacggctaaaacgtgagcattcaggaattttaatcccatacgtaaccatttcgcggtgaaattgacgttgtgacacagttcggcgttcgatttgaaacatcatcaacgctaaaatctgtaaatcagagacaattagctgcttgtgattacgacgttggcgaacatcaatacttaaacgattgtaaaaaggactaagaatttcaacgtacacattgatgcaggcttgaattggattcaaaacggcgatattctggtgttggcttgacatcagagccttacataggaaattaattattgtccttaaaagaacttactttcattaaccaatcaacgcttacaaaataagggttgttgtcatccttttctttttcgattaatataacatcatcatgtctcgctgctacataaaaaacgtcccctgaagaaaatataagacctttgtcatccttaccgtctattatgaatttgtatgctggtagaacttttgaagtagatttttctttattatccttcttaactagcttccttaccttcttaccacctgcttcaacaccacgaattattacatagccacctgctgccacaagagcaaggagttgctttggaccgcctaccttttttgcaactgttgtcattaattgataccatccaaggtttcccattttaattacctcactttaataattttttccaattgagtactgacattgttcctaaaatagtccctgcgataggaactagagcggcaaatacagagactagagctcctcctgtcactccacccgctgccgaagcagcaacttgttcgatagatttttgaacttcttcgtaagtgtcatcgtcaatccccacatcgctatctaaaagaatagtgctcttatgctagatttacggacagattttcttctgccctgtaaactaattgcatatgatcaactcttatctcttatatatttaatacaaatgttagcaaattttagcttgataagtcactaaagtatcgcttgagtctagttagggcattagtttaaccaaaatcaatttgatctaacatagtctctcgacttgcttgatccaagccaagataagtgagcgtcatggcctcacttgagtgattcaataaatgcatgactaagccgatattgtaatttgattgcgtataaacacgataagcacctgttttacgcatggtatgtgtacctagatagttgatgcctaatagatcaccaacgcgtgccataatcttgtaaaactgcttctcagtaatgtgacggtctgaatgggccgttgagggaaataaccaatccgaattaatgttttcttgtaccagccaatcatgatattgcagcaagtcttgttgcacgggctttaaatataatgtatttgctttaccagtctttttatcatgaataaaggccgtgtgtttaacagagccatctggattatagacatcggatttctttaacgtcatcacatcactcacccgcagcaaggtggccttgccgacttgaaagatagtgtagttacggcgacccgcccgaaaactatctaataaggtgtcttgtaccatttttaagacgttagagtcttttattggcagcacgatttgtgttgaaccatagattaacctttccagcttcttttttagggttattatatcatttataaaaaaaaagtccctattatctaatcactagataatgggggctgttttaatagtattctttaggggttattatgtaaatagcaacaaatatgaaaccgataatagacagtttaattattatgaataaacatttattacatagcatattataattcgtgtataattaaagaaccactcttattaactttttattcattgtttttcatattcatgtgaattgagaggaaaatttacttaaggagtaattatgaaactaagtagaaataccgtcattatggttgcagttctttcgctgttaggaattttcgttattatttttattttttttggacgtacacatacgacgaataagactcaaagactttaccgcattatgactacttcgacatcttcattgagtttaacgggtaaggtcgaatcagcggatgttcgcacattaaaattaccatccacaaacatttctaaattaatgattaaaagtggcgattacgttacagctaatcaagaattgttaacaacctttgatgacaaaacaggtgacatacagaagcagaaacaagaaattgacaagcaatcacgtctaataacccagtacacaaatcagttagctaatttaaaatctcaggcgacatctgaaaattcagttcaagatgcttcaacatcaattgcacaagttaacgactcgttaattgatgcgcaaactgatcttcaaaatatgaaaaatgacttgaataacacaataacttctcagtacaacgtcctaaaatctccaattgacggaagaattagtgtgcattttaaagatggtattccgtcattgacggtatattcaaattccaaaaacgcagtaggtgacgtatcggaatatgattactatgatttgatgaatagttctacagttaaaattgttgctcctgctacaaacaagacgacaagcaccactgtcggtgaactgaatttcgtatcaaatgatactagtaaaaatggtcaggctgaatactcattttcagcaccgatttcgtcagagtatctggatggacaaacattaaaaatattgtctactcatccaggaataagaattccgacgacctctgttgttgccaaaaagtatgtttatgtctacaaaaatgatggaaaagtatccaaggtccctattacgtacagcgagaaaaatggctatgcaattgttaattctggcttgcctgaaaatgtgaagataataacggatccggattcaaatttgagaaacaacaagaaggtaggtatacatgattgaaatcactaaacttattaagtcgtattaccgtggatcaaatcaaaatccagttttaaagtctattaatttatcgatatctaaaggtgagtttttatctattgttgggaaatctggtgcgggaaagtcaactcttataaatattttaggattgttagatgctgaattttcaggtcaatatcattttttagggttggatattagggagctatctgacaatcagttatcagaattaagaaacacaagcatagggtttgtgtttcaaaattttaaattaatcgagaatttgtctgtgtatgaaaatatagttctcccattgttatatgcagggaaaagtcgatctacattgcgaaaggtggtttctgaaacgcttgatcttgttgatttgcccaatttagaaagtaaacggccgaatgaactatcagggggacagcaacaacgagtggcgatcgcaagagcaataattatggacccagaaattattattgccgatgagccaacgggagctttagatagtaaaacttcccgagatataatgaatatcttcaaaaaaattaatgataagcgtaaaacgactatcattatggtcactcatgatttgcaacttgcccagcaaacaaacagaattattactatttcagatggcgctattttatctgatacaggaaggaattcatgacatgaaagtgattgaagtgttgttgacggcatggaagtccatacaaactaatctaaagagaagtttacttacaatggttggaatcaccattggaattgcttcggtcgtcgtgatcgtatccttggggaatggaattaagaaagagacgctaaagaatctacaagcagatagctcagggcgtcagactatagaaataacgtacacggataagaatcctaattcctataggcgaggattttctactgaagatatagagcttttaaaacagtctgacgaatctattgataaaatttcaattttggataataagaattcgttttcaaataaattaattattaacgggcaattgaaatccgcaacattccatttaactaaaaaagcgactaacgaaaatattattgtcggttctaacctttctaaggctcaagtaaattcatttcaacccatggcaatgatttccgattccgtcgcaaaaaagtattatgattctccgtctaatgcgctcaattcgtctttatcagtcgataatacgacatatactgtaacgggtgtctttaaaaataaaaaaaatgatggtctttcaacagacgtaatactgcccttaacgacatataaatctgcacagacaaaatcaactggagacacaattaaagtaacctttcaaagaaatgttaatatcgaaaaggccgcaaaaaacgtagtaaaaaatttaaacaagaatggcagccaaaaaactaatggtaaatatgaatatatagacatcggctcattacttagtggtgtaagcaatgttatctcaggaataacatatttcattagtgctatagcggggatatccttatttattgcgggaattggtgtcatgaatatgttgtatatatctgtatcagaaaggacgaaggaaataggagtacgtagggcaattggagcaaagaaaaaagaaatcatgattcaatttttgttagaggcggtaattttaactactttaggagggttacttggttttataatgggagcgggtctggcaatgattatttcccaattcttaccatttccggcagttattactgcgtcgtcttttgtcacatcgtttgtaatttctaccgtcgttggggtgatatttggaatattgccagccagacaagcggcggataaaaatttgattgacattttaaaataaaacttatttaaatgtcgatatgtaaaatgtagctaagagcagcaagaatcaatgtaacagattgttatattgattcttgctgcttttgcaaatctatacagtactatgttaatacaataacgttgagtgctttggaaagtagtcagacggtaaaatacaatataaacgaaaaaagcactaattggttcgccaaaaccaattagtgctatcggatacagtgattaggccactgtaacgacttgtcattttcggattaaccgaccatcaaattaagttattaggtccctcgggacctaatttcaaagcccgttaatcaagttatagcccctaaacaaacatcttttgtaaaaagccttttttctgttctttcaacaaatctaacttacgttgatgaagagtgatagtgttatctaactgtttgaagaatgaaccgattttttgttgttcttcataactgggaacagaagcaccaacactattaattacagttttcgataaactaggtacaccagtagattcatcaaattttttccaatttatttttttaaaaatagatagtgaaaattgaaggtcaatattttgtttaggaacagcgtaaaacaaggtatcgacagtccaaaaaggcgcttttaataaataaggcttatcaattgtccctttccttccgatcccaatggcatctatatctgatagcgctctatctacacttagcatatatccaccagttccatagacaggtattgatcccgaattcagatgtttgtagtcttttccagacttaacatcaataaaatcacctaacttacgctcttcccaatcgtcagcaaaccccgcaaatcgcaattcaggaactttttcaccatttttagggaacattttttgcaagtagccttttttctgttccttgagcaaatctaacttacgctggttagcagcgataaggttatcgagcttttcaaagaattcacccaacttggtttgttcttccggtgagggtagtgtaattggtgtttctaaaatatttttacaatctaccatttccacaagatagctttagcaatttcattcatactattaacttaataactataacaaactcttcattaaatacaaagattaatcgatattacacgcttctatatttgttgtacaattatctcattacgagtccaattgaggagcacccattcaatgcagtattttaaaatcctatttacaagtacattcacttttttaaagcagtcccaggcctattttcgtagtgtgttattgatgcatggctttttgcttttaatttgtctaccgcttttgagtaaagccagctacttcattctggtacataatcagatccagtttctcgcgttgagcaacttgccagcgcttattcatcagcatccgattgcgctgttagcactcgtaggaattgcgctactaattttattgctggctttcttcgaattcacgtttcttctattaagtgtgtactttattcagattaaacggccgctagctttgcaggcattgctgaagatgacttttgcgcaactcaggcaccttcgaattggcacgttctttttctttctatattattgtcttttaattttaccgctgggcgggcttggctatcattctgatttattgactaagtttaaaataccggcattcattctggattatattctcatgaatcggcgaattgtcgcgggacttttcattcttgtctatttgggcttattatatctcggcttacggctgatcttcaccctaccaaacatcattcttcagcagatgactttcaaaaaagcgttgaccagtagttggcagtttacacatcaaaaaattggctcattactggggcgtctactcttaatcggtgccgcactgattggctttacgggactcacttttttcctactcatccaactacaagcgttgattgaaacccacacatcagtgggactgccaagtgccgtggtcatcatgaccttgttgcaagctgctatgctcatcaacttggtgctttcaacagtcgccgtctttttcatcgtcattgattatttgttggccgacccacaatttgtgcaaccgacgttcaactatgcaaccttaaaattaagcgtgcagctcagtggtcgttggttattattcgtagcaaattgcgttttaatcggcgttgggacttataattgggactatctccgttcagtaaccattcagcagccgctaagcatttcccaccgtggcgtttcgcaaaaagacggcgtccaaaattcgattagtgcgctgcgaaaaactacccgattaaagcccgattatgttgaaatggatgtgcaattgactaaagatcaccaattcgtcgtctttcacgacttccaacttgccccactcactgggcactcagggaccccgcagtctaaaacactggcgcaactgactaaaatgaccgtccatgaacatcggcaatccgcaccaattgcttcatttgatgactatcttgcacgcgccaatcagcttcatcaaaaactactgattgaaattaagacacccaccaccgataatcccggcttggtgcaacatttcctgaataagtatcaggccaatatcgaagctcacggtcacatggtgcaatccttaaactggcacatcgtcgaggccgttaaaaaggcagcaccgaagattcaaacgggctacattctcccctttaattttatcggcccaccaatttcgaacgctgatttttatgccgttgaaatgacaactgtcaacagtcacttcattcaagctgcacatcaggaaaataaggccgtctttgtctggacacccaatgatcaacaagccgtccaacgcatgatgtatttcggtgcagacggcgtggtcaccgacaatctcaccgcggttaagcaagctaaacaacaaaataaccaacgacactacgccgataaactcgcatattatgtgatcggtattgggtaatatagtaaaaaaggattgggaatcgatatttttatcgatccacaatccttttttattagcgattctttctaagccaacgtcttacacttgaatagccaagcgtaagccccgttaagagcaatacaccagctgaatacacgaatccaatgacaatcaccgtcttcatcaagcctatttggcgaaccatgtcagcacaaaaagcagccatcaatcttcaattgacagctgcttgcactttatttgtctaaaagtcgttgtgctttttgggcggcgacgttcatgatgttccaaggacggtcaaaacctggttggaagaagaagtcagcgtatgctaaatcatcgattgtcatcttaccttgaatggcaagtgaaatggcgttgatgtttgccgtcacgtcagctttagacatgatttgcgcaccgagtacacgccgtgtttctggatcaaaggttaatttgaaatcgaccactggattttctgcttcagggacgaagtgtgggcgatatgtttcagaaaccaaaacagattgggtcttcacacccattttatcagccgttccttctttaatcccagttgaagcaaagtgataatcgaagacgctcaatgctgatgaacctgaaacagcgggtaccggttggttggcggtgactaagttcttagcagcatagcgaccttggcgacgcgcattcgttgctaaagcaattggcatttctttgccagttggtgcgtatttcacaaccgttgcatccccgactgcaaaaatatcgggttggcttgtttgtaagaattcattgatttcaatccggccgctgcggtcgagttgtaatgtatcttttaaccagcctgtgttaggccgaatcccagcagcttcgatgactaagtcagcatcgtattcagcttgatcggtcacaactttagttagcttaccgtcaacgccgacatattctttgacgccttgaccaactgcaggatagatattgtgcgcttgcatttcagccgttaattgatctgtaaattcttgatcgagatagagacttaatagacgtggcaagacatcaacaactgtaacatgtttgccagctttagcaaatgcttcagccgcttcaatgccaatataaccagaaccgatcaccacaacatttttaacggttggatcaactgtcttcgcctttaatttaatcgcccaatcacggccacgcattgcgtagacattctctaaatcacggcctggcactggtaattcaaatggtacagcgccgacactcaagactaacttatcgtaactttcttcacgcgttgtattattctttaaatccttcacttggaccgtatgttgatcggcgttaatcgcggtgattgcttgttgtaggttgacttcaatcccttttgcccgcatgccttctggtgtcgcataactgacatcatcaacgtttttgacggtcccttctaaatagagttgcatcccgcaggataagaacgataggaaatcgccttgttcgtaccattggatggttgcatccggataatcgagtaaactttcttgaacagtttcaaatccaccatgagatgaaccgacaacgataattttcacattgatcactccttattctattttacacaactcaagtataacgcagatgatattaattacaaataaaaacgcattctcggctgactttcaactgaccattcttaaattccatgctagaatagtgacaagctttacaataaaaaaacaatggagattgctatggcctttatcaaacgaaacttccccacttttatctatctagcaacactttatctcacctatcagattctaaatactttgattcgcatctttaccagtaccgatattctcgtctacgccaaagaatcattaactattttcatcgttttcttcggtattttctatttctcatatatattgttcggcgttggcttattatacgctggccacgtcatttcgaaacaatcgggcaactacgaaatttcactcatgattttaaacatcctcaccacttttagtacccttaccacgattattttaaaattttctggggcgcagatgccgcgtttcttactttcaaccacttttttcatcattttgaccaccatctcattagccacaacttccaaactgctacaactgcgcaccaagcgaattgacaataagtgactgccaaaggtgaagtagcgtctttttatgttaaggaaacatttttcatgaacggtaaaattgattactaccaactctttcaaacaatgtatcggcaatatgggccgcaacactggtggccttctgattcccattgggaaacaatggttggcgcggttctagttcaaaatacaaactggcaaaatgttgaccgctcgctcgccaatctacgatcaagtacgcacttcgagccaaacaatctgctttctctttcggatgaagcccttatgttggctattaaacccagcggcttcaataacgctaaaagcaggacaattaaagggctgtttcgatttttagcgacagttgattttgacttagacacgctcaatcagatgacaaccaccactgacctacggcgccagttacttgccatcaaaggcattggtccggaaacagccgatgtcattttattatatgtcttcgaccgcccagtctttatcgctgatttatatgcccgccgcttaattgctcacctagagcactgttctttaaaagacctccactatttaaaggtacaacaggttattgaaccacagctcttaccccaaatgactgttaaagactgccaagaatttcacgccctaattgacgatcatggtccagcctttcttgcagcacaaaaataagccggcatccgtttttagacggatgccggctttttaattatccaacaacccctttgcttgtatcagctgggtggaagagttggtcaataatacccgaaacgcgggttaaatcaacattcccgcctgaaactaaagccacaatatttttatctgttaaccattgaggatcaattttaccactcagcagtgctgccgttggtaatgcaccagcgccttctgtgacaatcttagtccgttgcatgagatccttcatcgcagttgcgatttctttttcggaaactaaaatcatttcatcgactagattttgaaccactgggaaagtcagttcacctggaatcgcaacgtctgtcccatcggctagcgtgaagtccgcatgatggctggtgattgtgcctgcttcaaatgaagccgtcatcccgtgcacgttttccgattgaaccccaatgatgtgaattgaggggttaaaggatttcaaagccgtcgcaatgccggagattaagccaccaccgccaaccggtacaatcaccgtatcaacattccaaatcgcatccaaaatctcaaggccgattgtcccttggccggccatgacttcgcgatcgtcgtaggggtggacaattgttaagcccttttcggctgctaactgctccatgtacaaccgcgaatcattaaaagtcgtaccatgtaaaacaacgttcgccccataaccggcggtcgcttgttgcttagcaagcggtgcttcttctggcatcacaacggtcgcatcaatccctaataacttcgcggtcaatgcaaccccttgcgcatgattgccggctgaagctgtaatgatgcctttagcccgttgctctggcgttaaatggttaattttattgttcgcaccacggaatttaaacgatcccgtcagctgcatattttccaatttcaaatagacatgaccgtgcgccacattacgactcaagaacatcgattgaattaaaggtgtttcgcgaatatacggtttaatggttgcccgtgcttcctcaatatcccggatatcgcaaatgtctgcggtttttaatactaattgattcgttgccattctggccacctcttccatttgaattgacacaaatgtctgcggataggttgtgctatccttcacaattaaatgtaagccacttatcaagcattgtcaaaacaaaacggccttaaattagaacgctttcatttggtggttattaagttctcattctagttgtttaaccagcaagatagcactagagtagccatgaaataaaatgatgaggtgttcaacatgaccaaatcagtcgttaactttttagctgtcattataatcgttcatttaaatcattttatctacaatgtgctattaaaaatagattaacgagcatatggagcactattgaacatctaatatccttcgtccaaaaataggtactgcccaatatccatccaaatgaacaataaataagccaattatagtcaattttcagctgatgcgcgcacccaaaagcaagccctgatacaataattttcatcaccgtatcgcattcgtttttttaataaaaaagagattaaagaaaataccagaaataataattcttctagtgttggtgcaaacaaatcattgctgagtgtcgtcaaaatcggaacagccttcattagctcattaatatagacttgattctccggcagcgctaatgggttccaacgtttatcgatccgatcaatcactagcacaataccaaacatcactaaaataagtacaactttctttagcatcggctctctttacacattttgccagtcaggttttggttgtctcatataaattctagtaaacaaaaagactattattagccacaccccaaaattaacagcaatcaatgctggttcatgcgtcgtcatataatttgtactcaacccgaaaagggcttccatatggacgaacatcattaatatcaataaaactataaaaaagctaatccgatggcataacgttccgatcttcaacaatttctttctggatcccctactaaactaataaccatatctaatcatcgataatgccgtcatttcttttaacttagcttgttgactggctgatagatccaagccttctttttgaatcacattcgcaattgcgatgttcattcggctcaaaattaatggtactgctgtcgtttgtgcttcaatttcagtttgataactatgcaaaactgattgtaatggtgccgcttggtcatcttgtttcaagtcgtttaataatgccttaatcattgtaattgcttgatgcccacgttcctgtccatctgcataccatttcatattcaatcgtcccttactcttaatcaactgttgagacaatcataacgcttatctacatcattgacaaataactaaaaaggaactataactagtgtgaattattgttatttggaggggtttaaatgataagtcaatcaattgcaaaagaaaacatccatacactttacaacagtctaatggcgcatccggataaatcaaatgcattgttagatattaccgatgttttactacaggtctacctcaaaattgatacggttaagaatcccgaggcactcgtcaatcgcctggccaattacatctatagtgttggctttggcaagattcatctcaccaaggatgaagaacacctattgattgatttaggcgcgtttggccaacgtgctggttggaacggcgtttatcgcggtgattatactgccaaagccgattttttcagctatgccgatgaacataaatatgctagaaattaaaagagtgtgacggaagtctgggatttcccgagcacgcttagacgattagatttgaccatcagaaaagggattgagacaaacacaacgtttgtctcaatcccttttttaggcaagaatattgccaatcccatggttaataatcgtaaattcagtcggttgtaaatcagtttgttcagtgacgattggattcaactggtcaatcgtaaacggcgaagtaaacggaaagccgtcaccgtactgattaaaataagtcacagtattccccagcacgcttttcaattgctcagaatcgattgcccgcgtcactgtcaccaaatacgcacgattgttatcgcccgtcaaagtggtgctcgtaaaaaatttaaaatagtctttcgtactcatcactgatccccccaatctttaatcaacgttattataacgctttcaaagaagcaattacagtatctttcgtcaattccattataatccaccatcattgcaattcatcaccgttacgccagttaacttagatacccataccacatcacttagtgattatcatcaactcaatccgaagaattacatcccagccttgcaaactgaatcgggcgatttcatgactgaatgcgccgttattttggaatacattagtcaccaaagttcgctgccattaatggcgaactatgccactgaacagtactggcaacaacgcatgtggttgaattacatcgccaccgaattgcataagaacttcatctcaccatttcgtaaaggcaattggctccccaatacacccgaaagccaagatttagtccgttcacgggttttcccacggatcgcttatattgaaaaagcgttagcgggccagtccttcttagttgctaatcaattcagtgctcctgatgcttatctattcgtcatgaccaattggtgtcgacgactcgcattttcattgactgacttccctaatctggaccgttttgatcaacacatgcgacaagacccagccatgcaatccgtcctcaaacaagaaggcaaaccacattcatcgaaagcttaaccaccaaaaaaggaatcagcagtcgctgattcctttttttaatgatttacatcacattaatcgtgacgtcaatattgccacgagttgcctttgagtatgggcaaatttcgtctgcttttttgagatacttcattgtttcttcttctgataaaccttcgatgtgaccgaaaagatcaacaccaatataataattggcagggccatcactataaagggaaacggtcgccttaatcgtgggttcgcctttaatatgttcttggttaaggacaacatctaaggcactgttaaagcaagaactatagccggctgcaaagagttgctctggatttgtactcttccctgatgggtctgtccctggtgacttgattacatatttctttgcttgatcgggtgaataaacgaagccattgcggcccccttcattaatcatcgttgtttcatattgttttgccatttaaggtccctctttcttttattgaatacccttactttagcacagcaaaattcagaaccataatgatttgtttatacaaaaaaggcgccagccaaaaaatagattttggactggcgcctttcttgttaatccttaggctataactggctgattattcacacgctatttaatataagccgtcttgtagctccattgtgcgccagctgtgttatgcacaacgcctttgacctttggattcttcaagtatgccgtatcattttgatagagtggtgtaatcccttggactttattcatgacttgtgcagccgtcacgaggtccgcccaacgtttgtcaggatcgttcgcatcggcattcattgcgcggtcaagggcagctttgtattctggattgtcgaagccaccggtattacttgcagcccctggtaacatgatttctaagaacgaaattgggtctttgaaatctgccccccaacctgcgagtaataaatcatagtcgccttttttatcacgactcgctgaaacttggcttggcacggtctttaatgtcaacttgaagcctggtaagactttttcaagttgacctttgagatattgaccaacatatgatgcgttggcatcatcggaattaagcgttaaggtgagggcaactttcttttgaccagtcgctttcagtgcttcatgccaatgtttaagcgctaatttttgattgtaatccacggtatctggcacggcttgtgatttagcaaagtccaccttcttaggggaatcggctaagcccactggcacgaaaccagtaatatcgtttttcttcgaaccgaatagccggttattcaacgtcttacgattaatcgctaacgaaatcgccaatctaaagtcttggttattcaaaagtgcttttttctgttcatctactgatttgaagttgtatttaatgtagttcgtcaacgcataaggatatctgtggaatgctttatcatcccgataattatcaatttgttgattatccaactgggttaaatccagtttcttttcctgataaagataaagcgcggtgctggtattttctaacacggtatagttgacttggtctaattttacctttttgcgatcccaatattgattgttcttcacaaattgccacttctcaatcgtcccattccagttaactaacttaaacggaccagagtacaccatgtatttcgcgtttgtcgcatacttcttaccatatttttcaaccactttttgatcctgtggggcaaataatggataagccatcaaggttttcatgtaggccacaggtgtggataatgtgacttccaacgtgtgctcatccactgcccgtatgccgagttggtctggtgccatctcaccttttgcaatcgctggggcattttggatattactgaaaaggtttgtataaggtgatttggtttctggtttcaatgtccgttgccatgaatagacaaaatcttgcgcctgaatcgggtcaccattactgaacttggcatcacgcagtttaaatgtccacgtcttaccatcagctgaaactgaactcgatttcgctaagcctggttcaattttaccgttctcaccaagccggaataaactttcataaatgttccctgtttgaccatatcccgttgaagtcgagatatcaatggtatctagtggtgcttgcgcgccaagctgaagaacctgtttggcttgcacccccgaaacttggcataataagaacaccccgaatataaaaattgcactaacactaagttttaagaactgccgccctctttgcatgacacgcctccttacatttaataagtagagtataccaaatcatcagtcaaaagttaaataataagcctaaaaaaagaggcctttgtaaaattaacttttacaaaggcctacaatattaattagacggaattctcgactgacggcacattctaaacgtgcttttcaaaccatgttcctgcgtttagcctaattagccaaataagcggcttcgccgctttttcgtctaattttgctaatcctcagaacataaacggtttgaacgcactcttattcgaaacgtgctttcaaaagcatactgctgtgcttagctacacaagtcaaatgattgctttcagcaatcattcgccttgttaggctaatgctcgcagtatacccgcttttgacgcactctttagttcattatttcaaacaattgttttctgaattctggaccatacatgactgctccgactgggatggcgaagtctagtgcttcgttaattttagtcgtccaggttggtccgaagcccccacagagttcaataaattgaatgccttctgccttcaattgcttagcgacttcaataattgaaccatcttctttagcacgtggatcgaacccgacggtaatcatctcgcacgttcccattggattacggttaatcaccgtattttgttcaggtgaaaagtctggtgaaaaatagaaaaacgcccatttatgcaaatttgctaatgccattgtttcgtcctccttgtttgctttcatcatagagaacaatcatgatagaggcaattttactgcctcttacagccagccattatgccgtgcaatctgaattgcttcaacgcggttgcttgcatccaatttgcttaaaatcgtcgacatgtaattgcgaaccgttccatccgataaaaataatgattcggcggcttgtttcgtactcaacccattagcaatcgcacgcaatacttccgtttcccgctcagacagtggattcttcgtttgcgttgtcagcccaacaactaattctggcgcataaacaactttgcccttcatgaccgaatgaatcgccacaatcaagtcatcactcgggccatcttttaatagataccctgccacttcggtgctgatagcctgcttgaaataactcggttgggcaaaagtcgtcagaataatcaccttaatctgtggctgacgcgtatgtagttggcgcgcaatctcaagccctgtcatgcccggcatctcaatatctaacaaaacaacatctggttggagggtttcaatctgatcaagtgcgacttgtccattgacggcggttccgaccatcgtcaaatcatcctctaaatccagaatgcccgctaaagcggtattcaatagttgctggtcttctgccaaataaagtttaatcatgcccttccctccatcttaagtggcaccgtcatcgtcaactgtgtgccccggcgaccatcgaccatcaactctccatcaatcgtttctaaccgttcgcgcatgcccacaatcccatgactcttatattgatcttcgcttttcaatccgcgaccattatcttcaatctgcatctgaaaagtcgttgcggttcgattaaaaaccacgtaacactccgttgcctgactgtagcgaattatattggtcacggcttcatgtaaacattgcgcaagcacttgttgattttgttgtggaatcccttcaagttggtcttcatttttagtcagcagtaaaatgcctgcaacgctgagattccgttcttgattgatcaattcctcagcaacggtcacttggcgtaaaccagcgacaatctcacgcactatttttaaattctgacgggaggcttgttcaatctcgagtagttgttcgggtaccgcggccggttttttcgccaataatttacgtgcatattccgcttttagcgtaatcattgaaaatgactgacctaaattatcgtgtaaatcccgtgcaattcgttgccgttcgttctgcttaatcatatcggttaatcgctgattggtctgcgttaattggcgatttttccgattgaaacgctgaatcgagctagccgcaaatggtgaaaagatgcagaacaagccgtacaccattaagccaatcagattatcgcgtcccatatgaccaccataataccaatatagggtgaccgctggtatgattagtgacaacagataagcgtagtaatagcgccagaaacttcggcggcgcatgggaatcgaaccaaacacccaggcagtataaatattcagataaaacgcctggataatgactgctaaaatcgcactggtcaccatttgtaagataatccagaatgtgcgataccgcgatgcgacatacccattgcgataagccaccaagaaaatcagaatcaagcccataatcgcttgctgcttaaccgtttgatacggaaacgcataaccaattggaaagagcaagaaaatcaaccaaacatatggaaataagccatattggggtggcatggcaatgtagcgtttaaaaaaattcatgcatgcatcgctcctcttttatgatggtttaagtatacgacaattgccagtaataacccagcccagagcaacgtgatgccatattcacccaagtgtgcgggttgatgcgcaatcagcgcttggccaatatgattaatcggataaaccggcaaatgcttgccaatcacgcgagctgttttgggcattatttctgttggccaccataatccccctaaaattgctaaggggaaagctaacaaactagacaccagttgaatctgattttcatcttttaaaaatgaaatgctaatcccaattaaacaaagggggatgctggcaaaccacaaccagcccgccgttaataaccaactggaccacactaaatgaatttgattactaatcccagcaactatgaaaatgacgccgatcgttaaagcattgattaagcctaagttcaacaacttagccccataataagtccgatgactggttggtgataaatcgattaaggaaaccaagccatcccgtgcgtcattataaagtaatgtcgataaagtaaacgtgttgctgagaactaaactataggtcgccatactgaccatgtattgtcgattgaatgctgcattcatcacaccctgtttcattactttcgtaaacaagagataaaacgcaatcggcattaagagtgaaaaaataacaaagcgtggattacgccaatatgcgcgtttaaagtctatttttgtttgtaccatcattgtttgcattttttagtcctccatcatttcgctataaatttcatttaatgagcttgcttgaacctgcacatcatgaacctggatccccatcattggtgctaattgacttaagatcggatcgctcttggtaacttgcaacagcaccttggccccagtcttcgtcacgcggatcacgcctggccattttgcaaaagtagctgctggtaaatcagtcgtaaagcgaatctgcgttcctttaaattgttgttgtaatgttgccaagtcaccatcgaattggaactggccatctttcaataataaaatccgggttgcaatgtgttcaatttcctctaaataatgcgacgtgacaataatcgtcttgccggcttcttttaactgttcaatttgctgccagaatttttgtcggctgccaacatccattccaacggtcggttcatccaagaatagcaaatccggattgcctgccatggctaaagcaaaggagaggcggcgtaattgaccacctgaaagttgggacaccatcttatgagtctgtgccttcaaatcagctagcgttaataattcagcgactgaccgtggctgttgataataactgcaaaccaattctaattcttcgatgacactgacccgatccagtcggacatttccttgcatcatcgcacccaataagttgaaatgttctttctccgttggcttctgacctaaaatccgaatctcgccagccgttggttggagtcggcctaaaattaaattaatcaatgttgacttgccggcgccgtttgcacccactaagccaacaatctcaccaggttgaacacttaagtctacctgatttaaaacaacttgttgttcgaattgcattgtcactagtttaatttcaatcattgtcatcacctcatttaataaccctagtatagaagtgattccgttttgtcgttagacgattttgtcatgacttacagatgacaaatgtcatgtctttggtgttaaaataaagctgattcgttttaactcggaggttttaattatgacaacaagccaaccagcagcaccatcattttttacgaaccggtctacccaagccatcgcgcaagatttattaggaactcacttgctttataccagccaccaaggcacacttggcggcctcattgtggaagcagaagcctatgtcggcaccgatgacactgccgcgcatgcttacaattggcgccgcacaccctttagcgagccgctctatcatgagcctggtacaatttatatctatcaattacgcggtttctttctatttgatatcgtgacccaagcagtggatcaaccacaaggcgtcttgattcgcgccatcgaaccgacccacggcattgaacaaatgcgcctcaatcgcccgaaacctggcgtcgaactgactaacggccccggtaaattaatgggcgccctcggcattcacgataaacaactgacttttcaaaatgtggcggacgcccctttaatgattgatttagcgcatcgtcgccaccccaaatcaattgtcaccgcgccacgaatcggggtcaattataaagcagcgagtggtcaacttccttatcgctattatgtcgctggtaacccgtatgtgagtggtctgcctaagcgccagtgggacttagaacaacacggttggcaattttagcgccaatgtcaatttttaattgaaaacgatttcaacaatgctataataatcttgtgaattaaataattaagttagaagatcattgcatgaaaattaaagcagctgttgttgaacaacaaggcgcaccatttgtcattaaagataacatcgaactcgcaccactccacccagacgacgttcaagtccacatggtggctagtgggatttgtcactcagacgaagcgcttcgtaaaggcgacgccattattggctatccaatcgtcctcggccacgaaggttccggaattattgaaaaagtcggttcaaacgttcaaagtttaaaagttggcgaccatgtcgttctctcattctacgcatgtggcatctgtgaaaactgtctcaaaggcgttccaacacaatgcctcaactacgcagaaaataacttatccggcgtgcgccctgatggtagttcccactttactgaaaatgaccatcacattgccgatatgttcgatcaatcttcattcacaaccacaaccgttgtccgcgaacgaaatgcggttaaagtccctgacgatttagacttacgcaaactcggaccactcggttgtggatacgtgaccggtagtggcactgttttaaatactttaaaaccaaaacctggcgacacaatcgccgtcttcgggactggtgctgttggactcgcagccatgatggccggtaaaatttcgggctgtacgaaagtgatcgctgtcgatatcatcgacgaccggctcgcactcgctaaagaactcggtgcaaccgatacgattaacagtcgtcaaacagacgacgttgtcgcagcaatccaagccctcacaaatgggcgcggcgtgaacttctgtgtcgataccacggggattacaccagtcatggaagattcaattaaggcgctttgccaaggtggggtgtcagcaacaattgccgtaaccccaaaccacatcgatcttgatacttggaacgacttatgtgtcaacgacaaatccgtcgtcggcgtcaacatgggtgactccattccgcaaatcgacgtccctcgtttaatcgaattctaccgtcaaggcatgttcccctttgataaaaccgaaaaattttatcaattcgaagacatcaacactgccaacgaagcctctattaaaggtgaaacaatcaaacccgttttgattattgacccggactatcaattctaagcaatcaaaaagaccgcttattcagcggtcttttttaatttttctgacgccaataatggccaagtgttatcaacatcatcaagacgattattcctctgagtaaccaaagacccaatagcgcgccaaacacaatggtaactgcagacactaatggcttttggaaaataaacgcaaaccctaatataataatcaatactggcatgcagtccagctccttttctttttgaaaattgcatgttaaatttaaagcaatcatatgaagtgaggtgttagtagtgccagctattcccgataatctacttgccgcgaccatggggcgtaaactcgctacggttcgtcgtgcgcaaggcttgtcccaacatcaattagcccaggatatttgttcgcaaccgatgattagtcatattgaaaacggcacttatattccaaacgccattttgttagcaaaactctgcgaacggcttaatatgccgttagaacaagcgctgttaagtcattatcccgaaattgatcaacaacccgaattcaatcaacaaattaaacaactgtgcaatgcacacgattatcgcggtatgttagattatttggatacgactggcttggccgaacaccttgaactggcgaccgatttacagacctactactactatcatggcatcgcagtattccaagaacttcatacaaccacggatagtttacgggaactacaaatggcactcgactatacgtttacaccgcgccaacaagttttaacgcctactgagattttgattctcagtagtatcagctttattaagagtacaccccatactaatcaaactgacttcgaacacgtcctcgcaattgtgaatgcagggcggttcacgcactatgacgagaacattaatatcttattctacctgtatagtctggcactctatcaagatcaccactttcaaaaagcttttgccatcgccaatcaaggaattgactggctcagcaatcatgattcacactacatgttagccgacttattcttgctagtcgcctgtacaataaaaaaagagctacgacaaaaaattgacttttgtcgtagctcttttttgaaattctatatggctcattctactgcgctaataattgtccaattcttgatttaaattcagttaagaaacgcggcgtatcaacttgtacacaaaccgccgtccgcgttgctggatcatctaggcgggcattatccccaattgttcgtccacgtgacgggccttctatctcagtcttcaagttcaatggggaagtcgtgactaagctaggatcgattgcaacagcgactgctaagggatcatgtaaggcacagccgtgtaaatggggagaagtgacttcataggctttgatatagtaatcaaccatatcggcataagctttggctgctggtgtaccgagtgcgcgccattctgccgtatcggtgcgtgtaaaaagtgtgcgcaacgtgacatcaaggcccaccatcgtcaccggcaaaccactcttaaagagtaagtccgccgcttcagggtcttgactgatattagcttcagcaaatggagacacattaccacaaactgttaaggcgccacccataatcacgatttgaccaactttcttcaaagttagtaaatctttttgaatcgctaacgctaaattcgtcatcgggccagttgccacgatgctcaagtcagccccatacgcctgacaagcacgtaatataaaatcaacggctgattcagttgccatttccggatggggctctgtcagatgaatctcaccaacgccgtcttgaccatgaatttccgcactaattggtaagacgctaaaatcatgcgtcgtcgtcgaatgcccagcccctaaataaactggaatgtctggatgacctaataaatgtaaaatttgttgactattcacaacgcttcgttcagtcaaaacgttgccgtattctgaggtaatcccgattaaatcgacttctgatgatcccaatgcataagcaattgctaacgcatcatcaatcccagtatctaaatccaaaatcattttttgtgccacgccaagccctcctcaataatcatgcaaaataatgtacaccacaagtgtaccccattatcggggacgggtaaattaataatctaaggattaaactcaaaaaagacaagtagattattctactcgcccttttcgatgattcagtttagaccattgatttcatgatgcattaaaatcgtttgaccatctgactgagtcttattttggagccgatctaataacaacttagcaactgccaatccaatcgcttctgttggcggttgaatcgataggattggcaactgtccaaattgatgttcatcggcataatcatagtgaccaaatagtaaatcttggccaatccgaataccattttctgataaataagtgagcgcaccaaaggccatattatcattgctgacaaataaagctgtaataccttcggctaataatgcttgggcaccgcggtacccgctagtccgagaatagtcaccttcaaaaacatgtaactgtctgtctggataagctgccatcgtctgtttagcacctgccagtcgttcacgggcaacataatcatcctgattagcggcaatcatcccaatattctggtgtccgagatcaataatttgttgcatcacttgtgccacacttgcgcgatcatctaataaaatcgaatcaacattgcgtagctgatttgggttattaatcgtcacaaccggaatatcaagtgccgctagtcgttccattccttgccattcttcacctgctaagaaaacaattaaaccatcaatcgaatgcgccattaaataatcaattttttgatcaattaacgctggttggtcactaaaaccactcaataataaactatacccttgttgctcaacgcgttgttctattccagaaacaacttccgcgccaaatcgacttgaaatactattcatcaataaaccaattgaaaaactttgattgttcttcaatcctttagcgataatattttgtttgtaatcgagttgctcaatggccgctgcaatcttggcttgattagctgctttaagctgttgcccattcagataccgtgaaacagttccgaccgagactccggccaattcagcgacttctctaacagatgacattcttattccccgcttatatcgataaagtgattttctccgctaaatcagcaaccataatagtcgctgcttgcgcacgtttcacctgattatcaatatccatgtaattaaaatcagcagcaggtagttcgaaagtaatgctcttttcttcacctggttggaaggcattcttttggaaagcttttaacagcttcattcgttgaataactgctccaccagttaatttgacaaataataaactactttcttgacctacaaactgtccgttattttttactttaacagttacaactagtttgtcaaccatttgcttaaccgctaattgtcgataatcaaattggtcgtaactaagtccgtaaccaaatggatataacggttggccaacctcatcatagtaatcatcttgtttagcagcatcgcgttgatagtagtaaaccggtagttgctgggtattgcgcgggtaagacacactcaacttaccacttggattattaagtcccactaaagtttcagcaattacgcgaccaccttgttgaccaggaaaccaagcaatcaatacagcatctgcaagttcatttaccagtgttaaatcgtatggccggccttgcaccatgacacatgcaattggcttgcctagtgctttcaattgcttgagcagcacttcttgttggcccacagactaagtgatgcgacatcaacattttcaccagaatccatgttgatgccttttgaactcactgccccgttacttaggaaggccatatcaaaattacgtgcactggaaccacctaatacagggatgattaaatcggcatcgcgcgcaagctcaactactttggcaattgcctcttcttgatgaattgaattacgcacctcacagcctaatgcatacacgacttccgactcgggaaacatttcttgaatcgcttgataaattgtttgcgcttgacgcgctgaactttgtgctgctgtataatcccccaagagattatataattcatcagcattggggccaatcaccgcaatcttttgcggctgattccggattggtaaaagcccattgttcttaacaagcgtcatgctttcacgtgccacttgcagattcagcgcatcagctttttcaagcaaggccgtcaattgcgcattcggggcttgtacatagggttgttcaaacagacccaacaggaatttcaacgctagtactcggccagcagcattatctaaggcagcttcgtctactaggccattttcaatggcttgatcaagcgttaggaatgtctgatcccataaacttagatcgacacctgcatttaaggctgccgccgcagcttctggttgtgtttcaaagattcctgataaccgatcaagcgcaacaccatctgccatcacaatcccttgaaacccatttacatcccgtaaatcttgagtcaacaacggctgattgatatgacacggtaccccatccacatcgttataagcagccatcacacctgccgcattcttgacactactcaaaaggggttcatagacgtctgaaaattcacgttggccaattgtgacggtgcctgaattatggccacccaatgcttcaccttgcgcaatacagtgtttcaatacaacaccaatggcatcagtcgttcgcggtttagcaggttggtctaagaaagcaacatcactttgaattaaatccccttgaaaacccgccacaacggcttcactcattcgcgccgctaaaatgggatcttcaccaaaacattcttctgaacggccccaacgtggatctttgaccaaatcaagcgtcgaaacaagcgctaggttaacgcctttaagcgctagttcttgtgccatcagatgcgatgattgctgcattaaccgcgtattaaacatattgccgcggccaatattcgttggatacgagattccttcaagcccttgatggccatgaggacattcttcaacaattaatgctggaatcccccagcgtgaatgcgccatgacatattcttgaactttattagcaactcgccaactatcctgtgcacgaacgccattttcaaagttcacttttgaccatggatctgcgcgaaataaaccataaagtgcaccgacaccgccgccccattcaacatgcgccttgaatttttctgtaaacgttaatgactgagaatcttcgaaagtttcccatccataaagatgttgattcacttgaccaattttttcctgcgtactcatgcgtgaaagtaaataagtgacccgctcacgaatggtcagcgctgcgtcttgatatggatactgcatttcaaaaacctcattcctcagttaatactttgttacttgcaatgacaaatggtaagaataaaaagacatctaaaccaattaataagatggttaaaatcgctgctcggtaatcaccgccagttgccaagaaagattgaataacaggcggtgtaatccatggtgcagccgctaccgttttactaatcaaacctaagcttgttgcaaaataagcaatcactaaattgattgatggaatgatggcacatggaatcatgaaaattgggttcataacaactggtaacccgaacataacaggttctgtaatattgaagaaacaagttgttaaccctaatttagcaacttgccgttgatctttccgccgtgaagcccataaaatagcaatcactaacggtaaaatacagccgcccccaccaatcaagccgaacgcatttgtaaaaggttctgtaataatatttggaatcgcatgtcctgctgaaaaagccgccatattttcttgaatggcttgtagcaatggtgcttggcgaactggtgctaaaatgctagaaccatgcatcccaaagactcataagaaatctgagaagaattgtaagaataacgtacctggtacagataatacaaacgattttagtggcgtttgaatcgcaaggtcgattaattgagggacgttcaacccggttgtcacatttaaaataaatacaaaaatagcaaaaatcaaaacaaccaagacttctgggaccaatgaattaaacgaggttgcaactgctggtggcacgccttctggcatcttgattcgtattttttcaaactttgtaaaacgaatgaataactccgtactaatcaatgctgctaacatcgctgttgcaagtcctgatgacgaggttaaactttgcaagaaaacgcctgttgcttccgccgttttcccatttgctaaagtgacggtactcgtcacaggcatcaaaataaacattgttgccaaacttaaaataccagcatgaactgcactaaatgcaggatcgttcactttcccagagcgaacataatgcgttgctaaattagcaccgatgttataacagaccacaattgataaaatactcatcgtcccattattcacaattgttgctaggtcagctaatccacttaaatcaacaatcttttgaacagcggcgtttgagaaaattagcgcatttaataaaaccataagcgaggccgccataacaagtggcattgtcacaatgaagctatcccgaattgcaattagatgccgctaattattgagtttagaaacaaacggcaacatcttttctgacagtttatctacgaatttcacagtcatttctccctttattgaatagaattgaaccggttcaatttcgtataatagcacgcgattatcattttgacaatagcgcttacaaatataacctaaaaaagattgagtcctcctcatgaacaactcaatctttaaaccattgacaaaggccacctattcctaggtggccttctaattaatttcgcatattaaattcttacataatgtcaggtagccagtcactaattggctacgcacactagcatcgaatggctagtggagatgacgtgtgattcacgtcgcttttatttttgggttaattcaattatgtctaaattcttgtgtttctaaatatcttctcgtttaaacagcgtaagccgcctctttacactacttgtaactccatggttactccagttgattaaagtcttcaaataatacttgatactacagtgataagtgctgattaactttcctaagtataccatattttcagttcgaacacaaaatgaccataatctttctgaaaagaggctttccatttgaccaaaattgacctttgctgtaaaattcaatttatagactacagagtgattctactctggcttatataaggaggcaattcaatgttagtaccgacagttatcgaacaaacatctcgtggcgaacgtgcttacgatatttactctcgtttactaaaagaccggattatcatgttatctggtgaagtgaacgaccaaatggctaacacaatcattgcgcaattattattcttggacgcgcaagattcagataaggacatctcaatctacattaactcacctggtggttctgtgaccgcagggttagccatcatggatacgatgaacttcatcaagtctgatgtccaaacaatcgcaatggggatggctgcttctatggccagtgttttactctcagctgggacaaaaggcaaacgttttgcattgcctaactcaactgtcttgattcaccaacctttaggtggtgcacaaggccaacaaactgaaattgaaatcgcagcacgcgaaattttgaagactcggaaacgtttaaaccaaattttggcagacaactcaggccaaaccttcgaaaaattacaagctgacactgatcgtgataactacatgacagcccaagaagcaaaagactacggcttgattgacgatattatggtcaaccaaccaaaatagagtagataataaaccggttctcttctggggattagtaaaaaaaaggctagatcaagttgatctagccctttttttataccaaatttgttatactggcagtatcttaaaggagggtcttccatggatattagtgtgattaaaagcgagaatgtgacaaccaccggcggtattacaattggtcagccagatgcaccattaacatcaattgaatttatcaacgccgcttgtccttattgccgcaagtggtttttaaaatccgaagaaacgatgactgaagcagtcaaagctggtcggctaaaacgtattatcaaaccttttgataaggataaagaggatctacaactggggaatttagcccatacctatttaccttttgatcaacccgaaatagtgctgcaaacactatcattcttgtttacgcatcaaaaaacatggcgtaatgatctgacaccagatgaatttaaaaaatacatcgatcaaaatctcaaattaacgccacaagataatgcagaaaatttagccgcaattattgctgaagccgatcgtgccaatattaaattcgtcccgaccatcattattggtgaccatatctttgatgaatcaattgatatgactgacttaagtcaactactaaaataaaaaacaggtgcccccccctcggggcacctgtttttgtatgtacgataaagggttccaaaaaattcaatttaccatcaaatcttttggaaccctttatccgtcattttatgaaaaacgtgcattatccatttgaatcgcattcaaatgatgttcaacttcattcatttcttgacgtaattcatgatacttatcgcttgagaaatcgagatagtttgtgcaagcaccaacccgttcgtagatttcttctttttgactttctgctttttcagttaaggtaacgtcaactcggcgttcatcgtctaatgcacgattccggcttacccaaccatcagcttctaagcgtttcaaaagcggtgttagtgtcccactatcaagttctaaatggtgccctaattctttcactgacatcttgccatgttcccacaatgcaagcattgcgatgaattgtggatatgttaatccgtaaggttttaataccttaccgtagaaatgattgtaagccttttgtgcgcggtaaatcgaaaaacagagttgttcatctaataatactggtttaaccatataattttcctccataaaatgtccttcagttattgtacttaattatattgtacaagtcaaatattgtacactaccgatttattttgccccttatccattcccctgttggtgggcttcggcaagttgattcaattttctgagccgatgattaatccccgacttcgaaattgccccactcggcattttttccccaagttccttcaacgtaatatctggaaattccaaacggagtagcgcaatctcacgcaacttcgccggtaaattatctaatccgacggtgtcgcgcaagtattcgatattttcgatttgttttgtagcagcatcaattgtcttattcatatttgcggtttcacaattgactaagcgattaaccgaattacgcatatcccgcacaatccgaatgtcctcaaacttcaacatcgcgttggtagcaccaatcacttgtagaaaatcagcaattttttcagcctctttcagataagtgatgtacccactccgtcggaaagtcgttttggcatttaagccaaaacgattcatcatgcgcgcaatatcttgattatgctcttcgtataatgaatagatctccagatggtaccggcttgtttcaggattattcactgagccaccggctagaaaagcgccccgcaaataagaacggacgcgctgatcttcattaatgacatcttctgacacctttgtatgaatggtaaaaccgtcctcctcaacaatatcaaggtcttttaaaacggtattggtatcatactttaagcgcacgatgtattgattattcttttttaacttcattttgcgacgtactagtaattcggattcaacttgataattttgtttcaataaactataaatccggcgagcaatcgccggattctcagtttgaacgtttaaaacaaattggtgattcatcaagctcagtgacccattcatccgaattaaagcggctaattccgctcgtgcatgttcaggatgcacttcaagttgcgtcagttctttcttcacttcacttgcatatgaggccacgattattcacctcgcttagctgtattgacctggaaagcaagattcataatttcactcgctactttttgtccattatggaacacaccatgatctttcaacttcaaaaagttatcggaaatcactcgacaacccaatcctcgtaagccatcaaagtcatgttcaaccggccagagaatttcgtcgtacttttgatgatccaaatagttttcagggacttgtgcggtattaaccaaaaccgtgtccacgaagttctgaccaagatgatcattcaacacgcggacgtgatcggcatcggtaaagtgttccgtttcccctttttgcgtcatgatattacaaatgtaaatcacttccgccttagtttgcttgactgccgcacctaagtttttaatcattagattcggtaaaatactggtaaacaaactgccgggtcctaagacaaccacatcggcagccaaaatcgcatcaaccacttgttgaacggcttcgggtgctgcagtatcatcttgatccgtttttgagacccaaacacgcttaatctgcttgcgtgctgcagtaatctcagattcccctgttaactgggtgccgtctttaaattcagcattcaacgacagcgcaacattggccgcaggataaatatgaccgtcaaccgccatcatttctgataaccgttgaacagcatcaaaaatacctgattccatttcagataacgccgcaataattaaattaccaatcgcatgccctgagaaaaaggcatcgtgtgatttaaagcggtattgaaaaatatcgagcgttaactgtggtaaatctgacaaggcgactaatacattccgaatatcaccaggtggtaccacgttaatgtaatcgcgaataacgccggatgaaccgccatcatcggcaaccgtgacaattgccgtagcatccgcattctgttcacggagactctttaagataacgggtagtccagtgccgccaccaatcacaacgacttttggtcgtcgccctttaatgacccggataatccgattagtagctgtcatgaccggttaaccgtttccttgcgtttcttcatatcccggtgggtcacgtcaaccggataatcgaacgataaatcatcagccaatcgttgggcaagcgctactgaacggtgttgcccgccggtacagccaatcgcaattgtcacacttgttttgccttccttgagataacctggcatgatgtcttttaacagcccactaaattgttcgtagaacttttcagtcgctggctgcgccattacatagtctctaaccggttggtctaaaccgtttaattccttaaatgctggcacatagtatgggttcggtaagaaacggacatccatgacgatatccgcatcaattggtaaaccgtatttaaacccaaatgacatcacttcaatatggaatgacggattatctgacgtcttgaagacatgaaaaatcttttctcttaattgtcgtggtgacatggttgaagtatccaccaccatctgtgctcgattgcgaatttcagttaacaggcgccgttctttttgaataccgtccattaaacgcccctccatcgctagtgggtgggaacggcgtgtttccttgtatcgcgaaaccaattcctcatctgatgcatccaagaagagaatcttagtcgtcacgaattgggtattatcaaggttagcaagcatttcaatgatctcatcgtaaaaagcacgtgagcgcaaatcaatcactaatgcaatcttagtcactttgccggactccttaaccaattcccaaaacttaggtagcaatgtcggtggcatattgtcgacacaaaaataacctagatcttcaaaactttgcatggcaacggttttcccggcaccactcatccctgtaatcactactaagttcaatgtatctgtcatcagaccaccccttaagttttcgcttttatcattgtaacattcctggtgtgtcattgaaagctgtcgaaactctcgacacgtgttatttaatgctattaaaccgagttcattcctaatgtctaggcatttgaaagagcttattttttccataaaaaaaattgcagaacaatcaaattgttccgcaatcattaaatttagagactataaacgtcttgcaaatgcgatgatgatggcattaatcccaaagaaagcaaagtaaaaaccaactagggtcaccatcgttacggcagtcaccactggatccattaacaataagatcccaacgattacgcctaagatattcagaatcatcgaaacgatgtataggcctgtgttaaattgcttgagatggccgacattcaataatgccacaattgaatcgaacaagaaccagaatgcaaagatataacctaaagcagccactccagctggaatattcaagataaacaaaattcccaaaatgacatcgacaatggcatcgaccaacattaacgttgcgcgcatccctgtctcttgacgtaaccgactatatgcactgattttggcaattccccgaataatcgccgcaatcgcaatcacgattaccaaaccagataatgtcttacctggttgattaaacaagcaatatgcaacgattaagaaaataatccccgtcataaattctgaccaatcaaagtgccattcattttttctaaacattcccaatcacctctcgttgttaatacctttatgatactttttttacggacaatctacaactaaatttgacaaaacaaaaagtgggcggttaaaacagcaatcattctgtcttaaccgcccgctttttaaacacattctatcaaccatcttctggttaatcctgagcggcaattgtgcgtgctgtatcgcgttctaaaacaggttttaaatattggcctgtatagctttcactgacgttggcaatttcttctggcgtaccggtcgcgacaattgtcccgcctttatcgccgccttctggtcctaagtcaatgatgtgatcggcagtcttaataacatctaagttatgttcaatcactaagatcgtgttaccttcttcaactaaccgttccaaaacgcccaacaagcgcttgatatcgtcggtatgcaagccagtcgttggttcatcgaggatgtataaattcttacccgttgattgtttctgtaattcagaggccaacttcatccgttgggcttctccacccgataaggttgtggcagactggcccaatgtgacgtagcctaagccgacatccacaatcgtttgtaacttgcgggcaatcttgggaatgtttgcgaagaagactgtggcttcaccgaccgtcatgtctaagatttcggcaatgttcttgcccttatagacgacttccaaggtttctgaattatagcgactgccatgacagacttcacacggcacatacacgtctggtaagaaattcatttcaatcttgataatgccgtcacccttgcaggcttcacagcggccacctttaacgttaaaactaaaacggccttttttataaccgcgtagtttggcttcattggtttgcgcaaacaaatcacgaatattgtcaaagacgccggtgtacgttgctggattactccgcggtgtccgaccaattggactttgatcaatattaatcagtttttcaagattctgataacctgtaattgttttatattgacctggttttgctgagttacggttcatcttttgtgccaaagcttttttcaaaatcgtattgactaaggttgacttgcctgaacctgaaacaccagtaaccgcgacaaattcacctaatgggaaatcaaccgtcagattcttcaagttattttcagccgcaccggtcacgcgaatcttcttgccattgccttgacgccgttctagcggtactggaatatattcggaaccggctaaataacggcccgtcaatgatttcggattatgttcgacttcagttggggtcccagcggccatcacttcaccaccgagttcaccagcgccgggcccgatatcgatcaggtaatcagccgcgcgcattgtatcttcatcatgttcaacaacaattaatgtattgcctaagtcgcgcatcttcttcagtgacccgatcaaacggtcattatcacgttgatgcaaaccaattgacggttcatcgaggatgtagagcacgccagataagttcgaaccaatttgcgtggctaaacgaatccgttgggcttccccaccagaaagggtcccggctgaccgactgagcgttaaataatccagaccgacgttaatcaagaaagttaaccgatcatgcacttctttcaagattggtttggcaaccacactgtctttttcagaaagttcaagttgatcgaagaatggtaaagcttctttgatggcgttgtctgaaacggcaacgatatcttggccgcccactttaacagccaaagcttgtcgatttaaacgagcaccatgacaggtttgacacgttaattcagtcatatacgtccgcatttgcgtccgtgtgaaatcactattggtttcacgataacggcggtcaatattggctaatacaccttcaaacggcacgtccacatcacgcacaccaccgaaatcattttcataatggaagtggaagttcttaccctgagaaccatttaagataatgtctttttggcgtggtgttaatttgctaaatggtcgatccatgtcaattttaaatgacttgcaagcttgttcgagcatctgtggataatattgagagctaattggattccaaggcgcaatggctccttcgcgcaatgtcttgctggtatcaggaatcactaaatccatatcgacttctagcttaacccctaaaccatcacagtctgggcaggccccaaacggtgcgttgaacgagaacaagcggggttctaacgcgcccaccgtaaagccacagattgggcaggcatagtgttctgagaaaagtagttgttcgccaccgatgatatcggcagtcgcatacccttctgataagcgcagagccgcttcgaacgagtcaaataaacgggaccggacaccgtctttgacgacgattcgatccaccacgatattaatgtcgtgttttttattcttatccaattcgatatcggcactaacgtccatgacttcactatcgacttgaacacggacatagccttctcgttggattttttcaaatacttttttatgttgcccttttttgccacgaataatcggtgacatcacctggagtttcgtcttctcaggtaacgctaagacacgatcaaccatctgttcaacggattgactactaatttcagtcccatcgttcggacagattggatgaccgacccgcgcccataaaagccggagataatcattaatttccgtgactgtcccgactgtcgaacgcggatttttagacgttgttttttggtcgatcgaaatcgcaggactgagcccatcaattgaatcaacatctggtttatccatctggcctaagaattggcgcgcataagccgataaactctcgacgtagcgccgttgtccttcggcatataatgtatcaaacgctaacgaactcttcccagagcccgacaatcccgtcacaaccaccagtttatcccgtggaattgtaacatcaatatcttttaaattatgcgctcttgcgccatgaatgacgatcttatcatttgccatgctttacctcttttaatcaatttcactcttaatctctaagatggtatcccgtaacgtagctgcctgttcgaagtccagtttcttggccgcattccgcatttgttcagataaccgttctaccatttctagtttttcagctttcgacatactatcgaaatcaatctcgttggtcatcttgacttcttcagggtgttcgactgattgaacaaccgaaatcgcatcccgaactggtttgataatcgtcttcggcgtcatgtgatgtgcttcgttgtaggcttcttgaatcgaacgccgccgcttggtttcatccattgcattgcgcatcgaatcggtaatcttatcggcatacaaaaggacttgcccgttttgattccgagaagcacggccgattgtttgaatcaatgagcgctcgctccgcaagaaaccttctttatcggcatccaaaatcgccactaacgagacttcagggacgtcaatcccttcccgcaacaagttaatcccaattaagacgtcaaacttaccaagccgtaaatcacggataatttccgttcgttccaaagtcttgatatcactatgcaagtaacggactttaatccccagttctttgagatagtcagttaaatcttccgccatcttcttggttaacgttgtaataaagacgcgttcgttcttttcaatccgatcattaatttcgccgaccaaatcatcaatctggcccataatcggccggacctcaatattcggatctaacaagccagttggtcgaataatctgatcgacctgaatatcggtttgttcagcttcataagggcctggagtcgcagaaacgtacatgatttcattgacgtgttcttcgaattcaggtagcgtcaaaggccgattatcaagcgcacttggtaatcggaacccataatcgattaacatttgcttccgggcacgatccccgttatacatcccgcgaatttgcggcatcgttacatgggattcatcaatcatcatgattgaatctttcgggaagaaatcgagcaacgtataaggtggttcccccgccgcacgatcctccatgtgccgtgaatagttttcgatccccgagcaatagcccatttcttgcatcatctcaagatcgtaattcgttcgttgttccaaacgttgggcttccaacaacttgccgtccgccttcaattccgttagtcggccttctaattcagccttgatactcttaatggctttttccatcttttcttcactagtcatgaaatgcgttgctgggaaaatcgcaacatgttcgcgttcaccaatgacttcaccggttagcgcgtcaacttcaacgattcgatcaatctcatcgccgaagaattcaacccgcaacgcatgatcatcacgtgaagccgggaaaatctcgaccacgtcaccacggacgcggaaacggccccgttggaaatcaatgtcgttccgttcaaattgaatatccaccaattgacgcaataagtcattgcgctcaatctccatccctggccgtaacgaaaggacgtgatcttgatattcattcggatcacctaagccgaaaatacatgaaaccgacgcaaccacaatcacatcgttgcgttccaacagcgcactggttgctgaatgccgtagtttgtcgatttcgtcgttaatactcgaatctttttcgatgtaggtatcacttgaaggcacataagcttctggttggtaataatcgtagtaactgacaaaatattctaccgcgttattcgggaaaaattgcttaaactcggcatagagctggcctgccaaagtcttattatgcgaaatgatcaatgttggtttgtttaaattcttgatgacgttcgacatcgtaaaggtcttcccggtcccagtcgcccccatcaagacttgtgcttttgcacccgcctcgaagttcttagttaacgtttcaattgccgctggttggtccccagctggttcatagggcgccactaaatcaaattggttatcattctgtcgttcaatcatcaaaagcctccattaccatttgctagcgataaaagaagacgccgggtagaagttgccctccaccataacgtctacttaccgattttataaagaataatattccttgtcctttaagtcattcactattctaccacaccgaacatactttcgccagagtgctgattaaagagtgcgtcattaagcggttatcctttgaggattagcctaaccagacggattagcgacgcagtcgatgatgcggctggtgtagctaaccggaaaaggatgcttaatgaaagcacgtttcaactaaagtgtggaaacgtgctgttgtcagtagattcctgcgctttgctacacttgtcaaatcgccgcttatagcgtcaattcgccaagttaggcaaatgctctgaatctgagcgactgacaacggcactctattccgctagcgtctgtctcactaattgggttagcttccctcgatctgcgaagtcttcactcagtaaatctggcaagatttcttggatgaaataacgggcgcatgcgagattttggtattgcataatcgtttttaaactttccgcaaaaatttctagaaaagcattctcaggattacctttttcaatttcaccaaaagactcgtagagtaaatcaatcttatcggcaacggctaataattgcccttccaaagtttcatcttttccttcactcaaacgacgttgataccgttcttgtaagaaatctggaatttcatttttaatgaagttagcggttaatgaactttcgacattggccaacatcgtccgcaattcatgcgttgcgtatttgaccggcgttttaatatcaccgataaaccgttccgtataatcgtggttcagtgcgcgttcgtacagcacttgccaattaatcgtttgcccattttcttcttcaatatcgcctaataattgcgcaatttctgctactttaaaggagtgcgctgcaacggaatgttcttgatatttaaacaatcctggtgcgcgatttagtgtctccaaattattcaaaccttgcaaatattgatgcatacccataccaaactacctcccttttcttacaaaaatagaccgactaacgcagtagtccgtctatttgctgttctttattataggtaagttatcctgaaatgtaaaacagaagccctatctattttacaagttcatgaattgctttttcgaagtttgctaacttcaaatcagctgttgcggcatcatcagcggatgtccccacatagaatttcacttttggttcagtcccacttgggcgaatcgcaatccaagtgccatcttctaagtgatatttcagaacattagatgttggtaaattgatgggttcagtatgaccgtccgcaaaagtttctgtttgtgtttggaagtcttctgctgaagcgactttgatgccggcaaattcaactgggctttcttcacgacatttaaccatcaagtcagccatttgttgtgggccattgaccccttcgaaatcaactgcagtcgtttgttcagcgaagtagccgtattccgcatataattcttgaatgccatcatacaaagtcttaccgtttgacttgtaataagctgcaacttccgctaataagaccaatgtttgaatcgcatctttatcgcgaacgaatggtttcactaagtagccatagctttcttcgaaaccaaacatgaaggtgttttcgtctgtgtcttcaaagtgttgaatttgttcagcgataaatttgaagccggttaagacatcaatcatcttcacattgtagctcgctgcaatcttcgttgccaattctgttgacacgattgacttaacagccgctgcattggctggtaatgtgccagcatctttactagcttgtaaaatataacgtaataaaacagaagcgatttggttcccagtcatcaattggtaactcccgtctggttgacgcacagcggcgcccaaacggtcagcatctggatcagtcgcaatcaacaagtcagcttgttgtgctttcccgagctcaatcgccatatcgaatgtttgtgggaattctggattagggaatggtgtcgttgcaaattctggatcagcaactgcttgttcagcgaccattgtaaattgttcaaagcctgcttgacgcaatgcgcgttcaccaagtactttcccggtcccatgaagtggggtgtaaatcaatgacatggtcttgccgactgtgtcgaccaattcttgattaatcgtgacttgcttaacttcagctaagtaagcttgatccacattttcgccaatcaaagtcattaagccggcttcgcgcaatgtgctttcatcagccacttcaatcgcaaataaatcggttactttgcgaatataacttgtgattaaatcggattccttaggtggcatttgcgcgccgtcttcgccataaatcttgtaaccattgtattgtttaggattatgacttgctgtaatcatgataccggcataggtatgtaagtgccgtacggtaaatgataattcaggtgttgggcgtaaggcatcaaaaacaaacgttgggatttgatgttgacctaagacccgcgctgcttcgtgcgcaaatgtttcagattgataacgtgaatcaaaactgatagccacaccgcgttttttagtcgcttctggtaatgtttccatgaattgagcgaggccttctgtggcttgacgcaccgtataaatattcatgcagttgatcccagggcctaaaataccacgcatcccagctgtcccaaattccattggaacgctaaatgctttttctaatgcatcatggtcgtttgccatttcgttaagtgctttttttaaaggtaaatccatttctgtttgattattccaaattgcataattatcttgccagctcattgtgtaacccccgcattttagtctaaaagctagttctaagtataccataatcaaccgctttcctaaagcatcggttgtacggtaatgcgcaccaagctaattgtctgggtcgattatttaataatgcttgtccttctaaaaattaaaatttttcccaaaataaaaaaacggccgactaaaatttagtcgaccgctggaaatgtgcgtcataagccacatttttaggttaatcctcaaaaataaaatcgtttcgaacgcactctaatcgtgcttcctcgaactgtcttttctggttaaccctgaatgtcaaacgattgctaccgcaatccttcgccattctgtgttaatcctcggaagctaaccggctgccgtcgcactctagatactttgtaagtatttaaatacttcttggcctgctatgccgccgtcgccaactgctgttgtaatttgacgaagatctttttcacgaacgtcaccaattgcgtagatacctggaacactggttgccatgtggtcatccgttttaatccaaccggcatccgttagaatccctagatcaccaaaggcactagtcattggttcaatccctacatagatgaagaccccacttgcagcaacttctttggtttcaccagttaccttatcaatgtaagtgacaccggttaccttcttgtcgtcaccttcaatagttgtcacttgtgcattccagatgaagtccatcttgtcgttagcaaatgcacgatcttgtaaaatcttttgagcgcgtagttcatcacgacgatgaatgactgtcaccttgctggctaattgcgtcaagtagaggccttcttcaatcgctgaatcgcccccaccaatgaccacgacttctttattcttaaagaaggcaccatcacagaccgcacagtatgagacaccacgaccgccgaattcatcttcaccggggatcccaatcttcttgtgttctgaacccgttgcaatgatgattgaacgcgcttcgaaatcgccttcgtcagtgtgcacaatcttcatctcgccttgcagttcaatcgagttgaccgtaccatagccgtattcagcaccaaattgagtggcgctggcatacatcttttcgcctagttcaggaccaaggattgatttaaagccgggataattttcgacctctgctgtattattcatttggcccccgtaaattccgcggtccaacatcaatacagataaattcgcacgtgaggcgtataaagcagcggtcatcccaccaggtcctgcgccaatcacaattacatcataacttttagccatgtctattatccccttacttttaaaaagtgctcgttcttcatagaatgtatcttacccgttatgtaaaaaaaagtctaccaaactgttttaccagtttgatggacttgttggtttcaattcttgtaataattcagtggcttcggcatcgaaatccgaatcgtcactctgtaaataagcagtcgctaattcatagctagcctgcgtctgatttaaaaaggcatacgccgttgctaaaaaatattgtaactcaggatgactctgatagttggcggttggaatttcttccagaacggtcgccgcaccatgatagtcgccaaccgattccaaacaaatcgctaattggcacaccacaaagatgtaatcatctttggtcttagccagcgactttgcccgttgtaaacacgttaatgcgcgcgtgtactgaaatcgttcaaacgcctgcatccctctgtcaaaataaaactcacaagttggtcttacagataccaaatcgcccataaagtaatcggttctcctttagcctttttctcaacgctaatcatcataacacactctgatgatgggtgcgatacccattcaaaatgatgccgctttattcgttaaaaagttttagacttcatcaaaatcgatttcaggtttacctgaacgccgcattaaatacgcaatttcagtcttaatatcacaatcttcatacaatacattatagatggcccgtgtgattggcatatcaacagaacgttgttgagccaattcataggctgctttacatgttgcgaccccttcgacgaccatccccatattggctagcacatcagctaatttttgacctttaccaagtgcatttcccgcacgccagtttctcgagtgaacactggtcccagtcacgattaaatccccaacaccggataatccgataaaggttaatgggttagcccccatggcaacgcctaagcgggaaatttcagctaagccacgcgtcatcaaggcggccttcgtattatctccataaccaagcccgtttaaagcgcccgcgccaagtgcaatgacgtttttcaaagcagctcccatctcaacaccaaccacatcagggttggtatataagcggaaataatcattcatgaaaatctcttggatccattgggcttgaatcaagtcacttgatgcggcagttaaggtagtaatatctttttgtgcgacatcttcagcatgactaggacccgataaaacaacaatcccattgcggttggtttctggaatggcttctgtcaagacttctgaaatccgtttgtgcgtgccttgttcaagcccttttgaagccgtcacaatcacgggtttcacttttttcgcaatcatcacaggaacaatctgttccgccaccgcacgaatcgcttgtgttggaattacaaacaagacaacgtcaacttggtcaagtgcaacgttaagatcaatcgttgcgtgtaactggggatcaattttaaaatctggtaaataatgtgtattggtatgctgttcatttatttcagcgacttttttaggatcattgccccacaactcaacttggtggccattttccactaataagtttgctaagatggtcccccatgaaccggcccctaaaactgcaatttttactgtcatctgataattctccttttaaacaaatccctatttctgttcttttgcttgattgccggttaaataatccggtaactgactgtgcttacgccgccaaatccaaagaccaattgcaccaaagaataagacgagtgagacaatctgcgatacccgcaatggaccgatgaataaactatcagtccgcatgccttcaatgaagaaccggccaaacgaataccaaattaaatagctaaataagatttcgccttgtttaaaccaaccagttcgatggcgaatgctcatgatgataataaaccctaatacattccatgctgattcatataagaatgtcggctgacgatacgcaccatcaattaacatctgttggatcacccaatcaggtaagtgtaacgattggagaaagtgcaatgttgttggcgccccataggcttcttggttcataaagttgccccaacgtccaattgcttgtgcgatcatcacggttggtgccgcaatatccaacactaaccaaggcgatagtgcatgacgccgacaatagataatgaacacaatggcagctgcaatcagtccaccgtaaatcgcgatcccgccgtgccaaatctgaataatttcgccgggattggcttggtaatacgaccattcaaaaacgacgtaatacagtcgggccccaattaaggcaaatggtaatgcccataaaattaaatttaaaatatcatcttcactgacattgcgccgtttagcttcctgtaatgccaatccaacggctaaaacgaccccagttgcgataatcacaccataccagtggatctccaatgcgcccaatcgtaatgcaatcggatttaatgcgcctaatagtagattcaaattattcgctccttttgtaaatgtgctttcatcaaaacgtacttttcaagctaaatttctgcgcttagcgtcgtgaagcaaacaatcgactgcgtcgcttatcgcttcactgtgctaatgcgcaaaagttggacaagcttgaatgcactcttatccaaaacgtgttccgtaagccatatccttccggttccccctgaatgtcaaacgattgctgacgcaatccttcgccattctgtgttaatcctcaggatatacccggcttactgcgcactctaaaaaaagactagtttgcatactgtctttctaacagtatagctcaaactagtcattagacctaccatatttaacgaacttttctgacttttaactattcttcttcatctgaattggcttcaattaacttgcctagattggcttcgaaggtcttcgttgcatcatagcccattgattttgcccggaagttcattgccgccacttcaataatgatggctaagttccgcccgactttaacaggcacggtaatcttcggtacagggacgtcgaaaatcatttgttcttcggtatctgaccctaagcgatcatatttcttatcctgtgaccaattttgcaagtggacaattaacgaaattgacgtttcagcccgcaccgcaccagcaccaaagaggttcatcacatcgataatcccgatgcctcgaatttcaagtaagtgacgcaaaattgcaggtgcttcaccgaccacggtttgttcatcttgttgataaacgtcgacccgatcatcagcaattaaccgatgacctcgtttgactaattccaatgccgtttcgctcttcccaacacctgaatcgccagtaattaaaacacctaaaccgtaaatatcgactaacacaccatgcattgagcgccgttcagctagctttccttccaaataatcggttactaaactcgacaaacgcgttgtcgataaattcgaccccaacacaggaattcccgcttcttcagctgctttaagcatttccattggtggttctaattggcgcgagaccaagaaacagggcgtatcttcagaagccatccgacgcataatcattaaccgttcttctggtgtcatattttgcgtaaatgaaacttccgtccgtccaaataattgcacccgctcgtaagggtagtaattaaagtagcccgttaattcgagtcctggacgggaaatatcactcaccgtcactgctttattttttaaatgtgcttcaccggcataaacttgtaattttaaatcggtgattagtttttgaattgaaacactatcagccatgagttacccgtccttcattttcacttatatcctctatcatattgcttttaaggtgatttttcaactttaatgtaggcgttttcttatctaaacaaaaaaaacgggaccaatgtcaatcttaattgacgtcagtcccgctaactttttaataacgctctctcacaaattgatttgtaataatcgtattggcaattgataagatgattgccacgatcacggctgctccaaaacttgtgaagctaaagtgggcgccgacgaaaacagcggtcaattctaacataatcccgttgatcacgacactaaacaagccgaacgttaaaaacgtaattggaaatgagagtaagctcaacaatggtttaataaagatgtttaaaatcgataacacaatgctggcgactaacgcgatccaaatgttttcaacatagaataaattgggcaataagccagaaatcgcaatgaataacaaagtatcaacaattacgcgtgtccaataccgcattagaaatcactccagtcatcatcgtctactttgacatcacgagcttccttgcgttgacggctaccttgatgtgctgtttcttgataagaatagtcttggtagtcatggcgccagtctgcatgccgtggacgtctacttgggccagcaattgcccggtagatgaagctgacaattaacccaatcacaatcagtggtagcgcaaattttaataataacagtagcgagccaatcacgagactaaacacgccaactgccgccataatggcgataatgactaataaaatcattaaaaaaggcattaaaactcactccattcactttcagaatcatgtttactctgacgtggccgttctggaatcaccatcgctaagatgatgtagaccacaatcccagggaacgctgctgaaaacattgagaatacaacatatagaattcgaactaatgtcgcatcaatattaaaatactcagcaatcccgcccatcacaccagaaatcattttgttatctcttgatttataaagtcttttccccattgttaaaacccaccattccttaattttttagttatcgttgtctttcaataaaatattaccagttgtcgtgcttaatgttaaacgagctgcctgttcattgtcgttacggccaagttgtaacatttgattccccgtactttgccgttgttcgatggtttgggtgtttgcaagccgatttttaatcatcccaaaacgcgtgcgggcatcaacagtcattgccaaagtttgtggtaaagctgtcttgattgtgccattcacagattttgcttttagatgttgtaaatcagttgtcgtcaaagtgttcttgatatccccgttgaccgttgaaacactcgcatttaaaacttgcgcttgaatcaataggttcccgttgaccgttgttgcgagtaaatcatcgtaacgaccttgatcaaaggtaatgccaccgttgacgttttcagcttccaccattgcagcgttggtgctgattaacgttaattcaccgttagtcgtcttcaagtaaatatcccggccggtaaagccatctaattcaacatccccgttcaataacttcacattcgtttgtaagtagttattggctggtaagtagaacgttaagtccgcttgaatccgtttattcggcacttggaagaccaagtcggcatcagtcacatcaattgtactgcgcgcttcaaaagcagccaatggtgttgcttctgccattttaccatataacttcacttgcgctgcgactttgacttctggacgatcccagatttggaaatgtacactaccgttagccactttgacgttaatcatttctggtgttacgtcagaataaacgaattcatggctgaacttttcagttgccaaaccaggcaccttaaagttcacttctttccaatccacattatccatgactgttttggcagtattcttcacgaacttaccaaagtgtgtgctagcttcgcctaacttatcgctcaattcatcaaatgtttcactggcattttctttccagtcatctgataagcctaatttttctgaccattgatttttggtcatttggcggcgttctttttcgatttggttgagttcatccgtcaatgcttcgcgtttggcttccaactcgtcgacttcagcttgcttttgtaataagccagccttgagtgtttgccgttcggttgctttttcactgcttaaactatctaaatcttccatcgtatcaaggacagtgacttgttcttgatcagcgtgcattgcttgcttcaaatcttgcaactgccggttaacgccggaaaggttaacggttaattcgtgtgccttttcttcaattgcgcttttatcagcggttggttgttcagtttgctccgttgctgtttcagttggatttgattttacatcttggtcatttttggctaaattttctaataagactaatgcttcttctgaagttaaaataccttggttcactaagtctaaaattcgttgacgttcattcattgttttgacctccattgatcattcgttgtactgtttcacttgactatgactctattatgccgattttacagtcgattgtcataggtccaaaggttgatttttatttaggtatcaagagtgagaacaaaaaaagcgcaggacaaaattatttttgtcctgcgcttttttgcttaaacgatttgtcctgggtaaggttcgccggcgacaaattggaaatcaaaggttgctaattcatccacactggttagacattgggtaatccctttagccaacattaggttgatgggattggcttgtaaatcatcttcacaaacaaagacgattggtttatgacaggcattcaagtagccgacttcaaacgccgttccagtatcttcgtcttgcatatcccataacacaactgccatgtctgctaaatccattgctgtgatgtcgttttgatacgtttggttggcccattcgtaccccccgaacatgccttctggatcatgatcttctgtcacacccttgtattgatgttcctgtggactatgaatataaccaatcgttgggttttgttttaaagccgcgtgtgcgcgttccactaatgaggcctgtttaggtgtaaaccaaccgccagctaagtatatttgtttttgcattatgattctcccactaaaaaagcgacgagcaagtcgaccttgtcatcgctttttaaaatttttaattgaattgtttagaattcatcttcttgtgcattggagtttaattccactaccttaccggttctgaggtagacaatccattcacagatgtttgtcacgtaatcgccaatccgttcgaggtagcttgcaactaacatgtagtccatgctcccaacgacggtttctgaatcacgttgcatttctttgatacagtcgtcataaatattgtctgaataagcattgattgcaacatcttcatcggcaattttgatggccttcttacgatcttctttgacgtaagcgtccaatacctcttcaaccatttgtttaactttgtctgccatatccgcaatatctttttcgatatcagggacacgggtattacccttgacccgaatcgttgatttcgcgattgaaacggcgtggtcacccatccgttctaaatctgaactagccttcatgattgtgacaatcacgcgaaggtcagttgagaccggttgttgaagtgcgattaactcaaaactcttacgttccaaatccgtttcccgttcattaatcttatgatcgtcagcaatcacctcgcgtgcgagttgcttatcgtgattaatgaaggctttaacagatttatagatggcttcgttgaccatcatccccatttcggagaagcgaacgtgtaaatcatttaactcatcttcaaaaagtcgtctcattgtggtttcccttctttcttagccaaaacggccactgatgtaatcttccgtttctttttcggttgggtttaagaaaatcttcttcgttggtgcgtattcaatcaattcaccttgtaaaaagaatgctgtcttatccgaaatacgagaagcctgatgcatattatgcgtcaccattataatggtatactgttggcgcaattctagcaacatattttcaattttagcactcgaaatagggtctagcgcagaagtcggttcatccattaagatcactttcggtttcacagctaacacccgagcgatacaaacccgctgttgttgaccaccagaaagtgataaagcactttcgtgtaacttatctttgacgtcgtcccaaacggccgcttgtttcaaactactttcaacggcttcatctaagacgcgatgatctttaacaccggataaacgtaagccgtaaacaacattgtcatagattgaaaatgggaatgggttcggttgttggaacaccatgccaacttctttccgtaacttaacggtatccatctcaggcgcataaatatcttggccattcaataagaatttaccggtcaccttcgccgagtcgattaaatcattcattcgattcaagcagcgcaagtaggttgatttcccacaaccagatggcccgatgagcgccgtaatttcattttcaacaaaatccatattaatcccttttaaggcctcattcttaccatagaatagatgcacatctgaggattcaataatcttatttgccacggggcaaacctccttgcgtcctagccaaagtgaccagaaacataatcttcggccgctttaatcttcggccgggtaaacattttacgtgtttcgtcgaattcaagtgcgtgccctgaatggaaaaaggccgtgtaatcactgattcgtgctgcttgttgcatgttatgcgtcacaatgatgattgtaaattcttcttttaagcgaatcaatgtttcttcaaccgtgttcgttgaaattggatcaagagctgaagccggttcgtccaataataaaatatcgggtttcatcgcaattgcccgggcaatacataaccgttgttgttgcccaccagatagtgccaatgcgctctttcctaatgaatctttgacttgatcccacaaagcagcttgttttagtgacgtttcaaccacttcatccagatactttttgtctttttgtccatgttgtttcaaggcaaaagtgatgttgtcatagattgatttggcaaatggattaggccgttggaacaccatgccgatatgttcccgcatcttatacacatcaacgtcatcgctattgatgttcaagccccggtacataatcttaccggtcacacgtgtattagcaatattgtcattcatccggtttaaactccgaagataggttgactttcctgaaccagaagcgccgattaacgcggtaattcgatagcgttcaaattgcaatgatgcatcgtgcatcgcgcgtttgtcgccgtaatagacgtttaaatcttcagttgataaggcaatttcatgttttggttcatctaaatgtttgatgtgcgtttttgttaaatcgtaatctgccattattttctcctatgctgctgtcattttacggtagacacgcttgccgatgacccgtgctaaccagttaaatagtaaaacggcgatgattaagacggcagatgcgccagcagaaaccgcagtcgcatccggcataatcccttccgagttaatcttccaaatgtgcaccgctaatgtttccgcaggtcgcaatggattcaacggactcgcgatgtacattgggttccagttggtaaaatcaagtgatggggcactttgtccagctgtataaatcaaggcagccgcttcaccaaagacccggccggcgcctaaaatcatcccggtaataatgttgggtaacgcttctggaatcacgacatgcttaaccgtttcataacgcgataaaccaagtgcaagacctgcttcacgttgtgtgaagtgaattgattttaaagcatcttccacattccgcgttaacaacggtaaattgaaaacggtcaaggctaaagcacccgctaagattgaaaagcctagcttaaactggataacaaagaccaagaaaccgaataacccgaccacgacggatggtaaggaacttaacacttcaatcgcggtccgaacaacattcgtcacccagttcttcggcgcatattctgcgagatagatgccggcaccaattgataacggtactgaaatcaccatcgccaaaattaatagatagaatgaattaaacagttggacgccaatcccgccacctttagtaaaggtttgcgcaggtttcgttaaaaactgccacgtcacgtgtggtaatccgcgcaccaagatatagccgagcaaacttgctaataataatacgatcaaaccagcgatgagggttagcacaccggtggcaactttatcccatttttttgcatccattagcgacctattgctcccttccgaccaattaaacgaactaataagttaaatagtagtgacatcaataataagagtaacgccaatgaccaaagtgcattattggctaatgaacccatgaccgtattcccaatgcccatcgttaacacactcgttaacgttgaggctggggtaattaagttatgtggtaataacgcagcgttcccgatgaccatttggacggccaatgcttcaccaaacgcccgggccatcccgaaaacaaccccggttaaaatccctggtgtggctgcttttaaaacgactttccatgttgtttgccaacgcgttgcacctaaggcgagtgaggcttcgcgataatgccgtggcacactcttgagtgcatcgactgtcatcgatgtcacagttggtagaatcatgacgaacaaaacacaagtcccggcaagaatcccaaagccactgccaccaaacaaatgacggacagctggtacaatcacggataatccgataaacccgtaaacaactgatggaatcccaacgagcaattccatcactggttgcaataatttttcaccccgcttaggtgagatttcagtcataaaaatcccagcgccaattgcaaacggtgttgctaataaagccgctaagaaagtcactccaaatgaccccataatcattggtaaggcgcccacttctggtcgaccatgactatctttcaaacttggattccaattagactgcgttaaaaagcggcctagattgattttatctttaaagaaggtcgctaacccttttgaagcgacgaagtagaaaatggcgagcacgatgaacacgattaaactaatacagaataaactgattaatttgccccgtgtttcacttttggctgcgcgtgatttcttaagtaaacttgctttaattggatccataattggccccctacttaacctttgtaattgtgccatcaaccgaccgttcaaccgtcatcttagcaactggaatatagcccatcttgccgacttgtttatgttgaacctcatctgataagacatacgccaagaaacgttttgttaacccagttggttgccccttggtgtaaacatgttcatatgaccagattggccatgcattagtcatcacgttttcatcggttggtgcaatgccgtttaatttaaccattgcaatcgaatcatctacgtatgaaaaagcaagataactgatggcccctggcgtgttcgctacaattgatcgcaccatccccgttgaatcttgttcttgagcgggtttagtcttgcgcgacttcatcacccattgttcaaacgtcgtccgcgtcccactaccttgggctcggtttactaaaacaaccggctgatctggtccaccaacgtcttgccagttatcaatttcgccactaaaaatcttcgcgagttgcgtcaatgttaagtttttaatccctaattgcttattaatgactggggtaatgccgacaacagccacgcgatgatcgaccagcttgtccgctttaatgccagccttttcttcagcaaataaatcagaattccccatctgtacagcgccagattgaatctgactcaagccagtcccagaaccgcccccctggacgttaatgaactgaccgctgtgatcagcactgtattgttcagctaacgcttcaatcagcggctgaagggctgatgagccgaccgccgttacggactgaccattttgtttagactggcaaccagccaatagtaataaactgaatgtgactaataagccaataacattacgtttgcgcatgttaatcctccacgaattccatttaaacctcgtaagttccattataaaaaaggtttgtaaaaactaagcctatcaaatgtaaattttgtgtaaatcaagcgtttggtagcttcaaaatgaattcactaccgacacctaattgactctttacggtcaactgcccctctaaactggcggtaatctcgctagcaattgctagtccaaggccggtcccgctcttatgggtcgcgcgcgcttgatcaacccgatagaatcgttcaaaaattctttcttgtaggtcacttggaatgcccaaaccggtatcgacaacgcggataacaatttgatctttttcaagttgcacggcaatcaccaacgagccgttttgtttattatacgtgatggcgttagcgattaggtttttcaagatttgattaaacttcattttctgaattctaatcgctaaatccgttggaatatcaacggagacgtgtaactgcttttgttgtgccttttgttgcatcagttcgagattagcctgcaccaattcacgtacattcacaagttgctcttgcgattggtccttacgatctagatgcgaaagcgctaaaatatcttgaatcagcgcagttaatcgcgtactttcgtcatagatgatttgtaagaattgcttttgcgtggcaggatcttccgccgcaccagctaacaacgtctcagcaaagcctgtaatagccgtcaccggcgtcttcaattcatgactcacattgctgacaaaatccaactgcatctgctcaacgcgccggacatcggttaaatcatataaaatgactaatgcttggaatttcgatttaaccgtattgagttggacaacattcgcatccacaaaccgttcttgattttgaatcaactgaatttcttggtgatgactctttcggtacctaaaagtgtgctcaatcatccgtgttaattcatacgtcttgatatcatcaatataggggtgtttctcagtaacaatcgtcgtctccaataaccgatccattgcttcattgtgcaaaacgacttcacgattttcgttaatcaccatgacgccgaccggtaaatggtcaattaggcggtcaaaactgccctgttgcatggcaatcttctgccgcatatgccgcatatcaccatttaatttattaatttcttgcgcgaggatatataatgacgcatctttttgaaaaataatcggttcgggcacttcttcatgccgaatatgatgaatattagcgactaaaattttcaagtggtcaaagaaatgacggcgttgccgccagaaacggtatagaaaaatccagctaccgattaaatagacaatcgtgaccgataaagcaatcttcggccacgtatgccagaactgttgctgaggcactactaagacaaagttgggccgatctgcttggtgtgcgtaaaacaaatacggttgcttattaactgtttgccgcgtactaaaattggcggcagaatgattccgattgacaatatccgtcactgctttttgcaactttgttttattcggcgattttggcgtcaaaacttgtaagccgttttggcgtaaccacttttgccgatcaaactgtggttgtttgatgattagcgcatagtcggcgccccgttcctttaacatcgcgtcttgttgttgggcaatcaccaaattgacaagcacaataaaacctatgtaaacagccactaaaatagtggctagctgataaaatctaaattgatcatgtttggtcatggttggggtcctccaattgataaccgaaaccacgcaccgtttttaagtaaactggatgacgcggatctgtttcgattttttcccgtaaatgactgacttgaatatcaaccattcgcgtttcggctggataatcaaagccccacaccgcatttaagagtttctcacggctttgaaccttgttaatccgatgcataaagtaaacaaggagttcgaactccttaggcgttaaatggagcttctgagtgccctttttagccacaacttcgccttcatcgaccattaagtcccctacttgtaaaatatcactagggtgcgtttcaacgactgctacaggctgtgccgtccgccgttcaattgcccgaatccgcgcgataatttcgcgtggactaaatggtttagtgacatagtcgtctccccccacttcgaggccgacaattttatcggtttcgctatccttagccgttagaatcataatcggcgtttttaactttgcctcccgaatcttcttggtaacggtaattccgtctagcttaggcaacattaaatctaaaataataaaatcaaacgactgctgtaaagccatcgtcagcgcttgtgcaccgtcagttgccgtcatcactttaaaatgttcttgttccaggttatagcgtaataatgtcaagattgctggttcatcgtctaccactaaaattgtcttcattcatgccaccctttatttacttaattctctgggaataatacaacgcctaactcatgtggtgcatcagcaaaaattgcgccttcagccatccggaactcaccgtttaaatcttgaacctttaaatggcaatacgttggctgactttgaatcgcccgataaaaattatcgttatttgagacagcctcgccattacattcaacaattgtatcgccaacgaccaaccccattttagcagccggcgtttcgcgtaaaatccctaagataaagacgccatcgtagggtttcgtaaagtgcaactgccgttcatgggcactgcgtctactcaaccgccattgtaatgcacagcttagtactagcgcaactgttaacatgccaataatccagttcggaaatgcaacggcaattaacccaaacccaactaacaacaagccaaagatcaaatagctattggcatttttagtaacaactgatttcattaagcctttgactgctttcaaactaaatcccaataacaatggcaagattaccaagctatatgattgatgcccgatatttaagaccggccaaaaacccaaacttggcatatcaattgcccctggcactaagaaaaagaccggcgcaatataaatttgtcgactcataaagaaggccgtcaaccgccctcgcttgctagtcatcacacgcggtgtcacagttgcctcggcatcccaacgttgtaaaacactattgatgacggtcactaacccaataatcaccaataattcagccaaaagacttgcttgaccttccatctgatattggggccatatgaatgttgcaccagcgtagaccaaagcactgattaaaaaggttgccgatacgttttgccatctagcagccactagcaaactcaaaatagcgattagttgatagaccagccaccattgcatattaaccatcgcccctaacactaaggtacagcaacttaaggctagccctgcgagtagcccatggcccacaaaatggcccacttctatccatcgtggattaatcgcaattctaaaggtcttccgttccaagctaattcgtctatgcgctaaccagccagcatacacaatcgctaaccataaaagtggtaccgttagtaatggtcgcaaaatatcaatgatcatcgtcaattcaacaaacccccagcgtctatatttaaataccgtgcgtgtttccaacgacacacgctcgatttccagctgccgaatttcgcagttatcccaatcagtatagcattttgcccccttaactgcctagggttcaaaaaaaaagagtgacgaacaatttaatgttcgccactctttcactaatttagtttaaattttaaggaaacgacgcattgagatgacagaacctaatgccccaatcacaatcccaatcacagccattgttaaatcaagttggaataagaaaattcctggtttcaacattgaataaccggctgaagccatgctgagtgccatatgacggtaaacccaaccataacctaagtcgattacaataatgggaataattaccccaagtaatccaacccaagccccttcaaaaaggaatggccagcgaatatacgcgttagttgccccaactaaacgcataattccgatttcgtcgcgccgcgataaaatcgtaatccgaattgtattggaaatcaagaacactgccacaaagagcaataataaagtaaaaccaacgccccatttacggacgctactcattaccttgaacaacttcttagcgttgttcccaccataagtggcatcataaacgtatttcaattttttcgcttgtttagcgactttaatcgtttgacttggttttgtcgtacttactgtgtaaacatcgtacaacggattatcgtctccggtaaacatcttaaatgattgaccgtaactgccgacaaccttgtttaattcctttttacgacttgaatacgtcacttctttaacagacgccattttttcaagtttcttttgtagctgatctttttgtttacttgttgtgccccgttcaatcataacccgcacgtgcacatcattttcaatatcttgtgaaatcttgttaaagttgaagatcatcgcaaagaaaatcccgactaataacaacgttacggtaactgcactaacagctgcgattgacatccagccatttcgttttaaactcttaaaactatcgttgagatgacgcttcaatgttctaatcttcatagccgtagtcaccttctttttcatcacgaactaagcgaccgtcttcaatcgctaagacacgatgggtccgttcgttcaccatttgtttgttatgggttgccattaagacaatcgtcccacgttcattaattgcttctaaaatatccataataccatctgacgtttcaggatctagattccccgttggttcatcggcaatcaacacatctggccggttcacaatcgcacgtgcaaccgcgacccgttgttgttccccaccagaaagttcatttggaaagcgacgaatttcacccttcaagccaactagttcgagcacttctaatacacgatctttgattgcttgaggttctgcctcgatcacttccatggcgtatgccacgttttcaaacaccgttaaacgtggtaataacttgaaatcttggaaaacaacacccatcttacggcgtaagtatgggacatcgtgatccttcataccgattaaatcaaaaccagcgacttcgatttcaccactcgttgcttttaattgatggtacaacatcttaatgaatgttgatttaccagcaccactgggaccaacaatataagcaaattcgcagggttcaatcgttagcgaaagatccttaattgctgtcacgccatttggatacttttttgacacatttgtcattcgaatcaattggggacactcctttttttgtcgttatcattatttattgtcaatgaaaaccgcaatcttttatattatagcatgctatttattcaaataatcacaatttgattacatttatatttcaatttctttgcagctagtcgggattcttctgactcaactgccattgcagataggcatacataaatggatccaaatcgccatccatgactgcttgcccgtttccggtttcgtagtcggtccggtggtctttaaccatcgtgtacggatggaatacgtatgagcgaatctgtgagccccagccaatttcaagctgttcgcccttaatagcagccgcttttttcgcctgttcttcttgttctttttgatacaatttagccttcaacatattcatcgcagtttcgcggttttgcaattgcgaccgttgcgcctgtgatgaaacaacaatcccagttggtaaatgcgttaaccgcacggctgatgatgttttattgatatgttgcccaccagccccgcttgaacggaagacgtcaattcgtaagtcttcggtgcggacttcgatatcaatcgaatcatccaattccggcatcacatcgactgaacaaaacgaggtgtggcggcgcccagctgaatcaaacggtgaaattcgtacaagccgatggacccctttttcagaacgtaacatgccatacgcgttgtgccctttaatcatcaaggtcacactcttaatcccagcttcttcaccggcctggtaatcttctgtttcaacggtaaagccgtgtgcatctgcccagcgtaagtacatccgcaaaagcattgaaccccaatcctgagattccgtaccaccagcaccaggatgcaattcaacaatcgcgttattgctatcgtagtcgcccgatagtaattgtccgagttcatattgttgcatctgagcttgaacagccgtcaaatcagcttcaaaactcgtctggagttcagcatcgggttcttcttgtaatagctctaatgtcacttgtagctcttctgattgcgcttgaagttgcataaaagagtcgtatttttcctttatggcgttattttgatcaattaactgttgggctgctttttgatccgaccagaaatcgggatccgccatttgcgcttcattttgcgcgatgctttcttgcaggccatctaagtcaaagtgaccccctaaattgcgttattttagcttcaattgcttctaaaagatgttttgcttcacttaattccatattttagtccctccactattttttcccattaaaaaatggctaagttaactacctcagccattttctacgcgttagcgtcgaatattttgacggatttccgccttcatgaagagccgggttgtatcgtaatcgatgtcgctgatcatttcttcaaacatccggtaaccttcttcttgatattcaaccaatggattcatttgaccgtagccccgtaatccgattgagttgcgtaattgatccattgcatcgatatgatcggtccagcgttcatctaccacacggaggataacgactttttcgaattcgagcatttgatctgcatctgctaattgtttttgttttgttgcgtaattcttttctgcaaaggtcatcaataatgattcgatttcttcagcagtcttaccttgtaatttttcaattggtaattcttcttcactgaccattgaagctgtggcaaatgcgtggattgcttctaattcccagctccccatttcaccttgtgtatgcaattgcacaatccgtttaacggttcttgaaatcattggcatgataacttctttcaaattatcttctgccatgatgacctgcatccgttgtttatagatgacttcacgttgttcacgcatcacatcatcgtattgaagggtttgtttacgtgtatcgtagttattcccttcaacccgtttttgtgcggcttcaacttgacgcgtaatcatcttactttggatcaccgcatcgtcatctgaaatcttcattcggtctaggaaggctttaatccgttctgaaccgaaacgtttcatcaagtcatcttccaatgacatgtagaattgtgtgacaccaggatctccttgacgaccagcacggcctcgaagttggttatcaatccggcgtgattcatgacgttcagtcccaataacagccaaaccgcctaaatccgtcacaccaggtcctaatttaatatcagtcccacgaccagccatattagtagcgatagtgaccgcaccacgttgaccagcattcatgataatttcagcttctttaaagtgattcttagcattcaaaacagcgtgtggcacgttattttcatctagtaatcgcgatagtaattctgaagattcaaccgcaacggtcccaaccaatactggttggcccttagtataacgttccttgatatcttcaataaccgccttaaatttactttccaaagttggataaagcacatctggtttatcgattcgggcaattgggcggttagttggaattgagataacttccatgttgtaaatttcgcggaattcttcttcttcggtcttcgccgtcccagtcatccctgataacttgttgtacattctaaaataattttggtatgtgatattcgccattgttttggtttcatcttggatttcaacgccttctttggcttcaatcgcttgatgtaatccatctgaataacgacgaccatccatcacacgacctgtaaattggtcaacaattaggacttcgccttcttgaaccacataatcaatgtcttttaacatgatatagttggcccgtaatgattcgtccaaatgatgcgtcaaggctgtattttcagtgtcatataaattgtccaagccgaagttagcctcagctttttcaatccctgattctgttagactgatggtctttgttggccaatcaatcttatagtcagtttcttcttttagagttttaacaaaacgatcagcacggatataaagtgctgttgacttttcagcttgaccagaaataatcaatggtgtccgcgcttcatcaattaaaattgaatccacttcatcgacaatggcaaagttcaatggtcgttgaaccatttcttctttgtaaaccaccatgttatcgcgcaagtaatcaaacccaagttcactattcgttgaataagtgatatctgagttgtatgcgtcgcgtttttcttctggtgtcttagcatttaagtttaacccaacagaaagaccgagccagttatataattcacccatttccgttgcatcacgacttgaaaggtattcgttgacggtaacaacgtgaacgcctttaccagccaatgcatttaaataaacaggcatggtagccgttaaggttttcccttcaccagttttcatttcagcgatgttaccttcgtgtagcgtaatcccaccaataatttgtactcggaacgggaataaccctaaaacacgtttagcaccttcacgcgcaaccgcaaaagcttctggtaaaatatcgtctaatgtttcaccatttgctaatcttgttttgaattctggggtcttagcttgcaacgcttcatcagataaattactatattcatcttcatagctttgaacttgatcggcaattttgcccattcgcgctacttcacgtttatcgctttctacccatgtttttagaaagtttgccatgtgcgtcaattctcctctagaaatacgtttgagttcttaaatagcgatttcttatatagtcaatatgattactaacaattcattttaccatttattacaatcaaataaaaccctgtcacagtaaacaatccagccaattcagtaaaaatttaaccccattatctatatggctacaaaaaagggctgagcgcaactcatcgttgtcccagccctaacttaacgttcacttattcatcagtttcaatcaaaccgtaacgaccatcttgacgtttataaacaatgcttgtaccgtttgtttctgaatcttcgaagatgaagaactcatggcctagcatattcatttgtaagattgcttcttcactatccattggtttcaatgaaacgcgttttgttcgaacgacttgcattgattcttctggtaatgcttctgcttctggcaccgttaattccatacccttaatcccgcgttcacgtgatttacggttaatctttgttttaaatttacgaatttgtctttctaatttatcagtaactaggtcgacgctaccatacatatcaggcgatgtttcttctgctcttaatacaaggtatggtaatggaatggtgacttccaccttagcggttttatcggagtacacttttaaattaacgtgtgcagttgcggtcgctgaatcatcgaaatatttttcgagtttgctgattttcttttcaacataactccgaattgcgtcagttacctcaatattttcaccacgaacattaaaacttagcatatgaattctcccctttcacaaataccccctgtgggcacttgtcgctcggaactcaattctttcccgaggctttgttactgacttcattatatataatttgcgcgtaacacacaaataatatggtcctagtggactaaagtaattgcgtgaattggcagcgtttggtatcgcttgcggagacactgctgagcatgccataacgtgcgcccagtggtataaatatcatccaacaaaattaactgctgcaccttggaacccaacagcacgttctgcgcgcatttaaaaaattgcggcgttgctaagcgctctgcacgatttttttgtgcttgtcctttttcagttggtagcttctgcaacaatggggtcagtggaaaacagtcctcgtataagccaaccaccggattgaatccgcggctttgcaaatgtgttggatcagtcgggactgggatatacgccgtttgccgttgcacaggaaaattttctcgaatcagccgttgaaatacgtgacgtaatcgataatccccctgccccttatagcgttgaaaatactgttgcattggttcgttgtatgttaacaacgctcgattagtaaattgttcgcctggatacagttgctgccatctctggcaatccggacacaccccctgggttgtcatttgccgaccacatcccgaacaacactgcggcccaatccgttcaaactgtgccatgcaacgtgaacagatcatcgccggatagactggtcgcaatgaacaaatcaatgcaatggagggttgttcaaggataactgccgcacacattaaacagtggattgtaatcgccgtccttttcgattttgtcgtttaatttgttgacacgcacgctgaatagcgaccgtgtaatccgcgtagaaaaaataaaccggattggcagcatgctcttgctgtcgtccggctcggccagcaatctgtacaagcactgattcagtgaagaccacgtgttctgcaccaagaacaaacactgcaatatttttaaacgttacgcctcgttctagaactgtcgtcgtaatcagcacgtccccgcatcctgctctaaaggccgctatcttgtctaattgattaggatcgccagcatgtaccgtgttcactgtaatgtgtggcaatgcccgaacaacgctctgctgaaccgcctctaaatcccttacctgtggcacaaataataataagcgttgttcttgaagacacttcctgagtaagttgcgcatcacggatggtaactgatgccgtttaactgaacgccgccacgtaaacaagggatagcaatgcggttcaggtaataagtgaccatgaaagcgaattggtagctcactacccgttaaatcccctgtattaatcgcatggcgcaactttacagttggtgtcgccgtcagatagatcaatgcacagcatggcttacacgcctgtttaacagccatctcaagctggggattattgacaaatgggaacgcatcaacctcatcgacaatgacagtgtcaaatgcctgataaaacttaaataactgatgggttgtacaaacaactaacggcgtataccggtaaggcgcagtctgttccccatgcatcagcatgattggtgtgttagcaaacgctgcttgcaagcgcggatagagttctaaacaaaccgccacccgcggcgcagcaacacacacacgctgcccattagctaaagccgtcgcaatgccttgaaataacatctcagttttaccagcaccggtcactgcagttaagacatggcgttgttgcttggtaatgaccgcaacaatctgctttgcggcttgtgcttgaaaaggggttagtgtccccgaccaagttagcggttctacgatcgactcaaacagattgcattcaggcacgtaaaccaactgatccccttccactaaccgcccaaaggtcaagcaagcagcacaataataccgaccatcaggtaagcgagcttgctctttcaccacttgtccacaccgttgacataccagacgctgattaactatttgaaacgctagtcgctgtttaatctgtggtaaactataattattcataacggtactcaattgggtggcactccactgacgaccataagcaagttgttttgccatcatttcaccttccacccttagttccgttaaatccagcttattttttcaaggagtccggtatgcaaagttattttaccgttcaaaaagacggcgaatttgaactcgaaatcaaaaagtcacgcttcatctgtcatgttgcgcgtgttacagacgaaaccgcagcacaagcgttcatcgcacaagttcgcaaagcaaatctgaaggccaatcataattgtttcgcctaccaattaggtttaacggccaatattcaaaaacaaagtgacgatggcgagccaagtggcacagccggcgtgccaatgttagaagtactgcgccagatgcagctcactaatctgtgtgtcgttgtcacccgctattttggtggcatcaaacttggtactggtggtcttattcgagcatacagtcacgccacttcggccggacttgaacacctcggtattgtccaaggtatcgaacaaaccgcttgtcagattacaattgactacgctcaatttgacactgtgcaaaatttacttagccaattaaacctcactgccgaagacatccaatatacgactaacattcaaatgaccgtctggttagcgactacagcagttagtgatttacaacaacaattaaccgaacgcctcaacggccaattacaattcgaccttggccctcaacaattcaacgaagtccccattagcgcacaggatttacaccagattcgctaccaataacgcaagaaaaggattagccaatggctaatccttttcttcattcttcggttttaataatcgttttaaaagcatcaataatgggcggcgattgtcaccaagtaacccaattgattcaacaaataattctaagccaattaagacggctaccgtcaatgccaagcttccccagagtgtcgatagtggatagagcaatgaaatcaacgagaagaccaatgccagtccataaatcacgagaaccgtttggcgatgtgataaaccaagttgcatcaaacgatggtgtaaatgatgtttatctgcttgtgaaatgggctttttattcaaaattcggcgcaacattgcgtaaattgtatccgtaattggtacaccgagaataataactggaatcaataacgtaatgaacgtcacgttttttaaacctttgagcgataagaccgcaatcataaaaccaatgaataaggccccggtatcccccaagaaaatcttcgctggatggaagttatgtggtaagaaaccgattaatgcagcgaccaaacaaaaaatcatgattgagacgctgacattggtgattgataagaagaaataggcgatgacgcccattgtgaagagtgcgataatcgaaacgccagttgctaagccatccaacccatcaatcagattaacggcgttggtaattgccagaatccaaaaaatggtgattgggaagcttaaccatcctagttcaaaggtgcctaaaaatggaattgtcaaaatattcatgcggacgcccgctaagaaataaatgaccaatgctgctaataaaataccgagcatcttttcctttggattcaattccttaatatcatcgatcatcccagtgatgatgatgatacattctgctaagaagatactgaaaagttcgtgtgtttggaattgcccgcgtaataatacgaaggtcccaaacgtaaacgcgataaaaatggccagaccacccattgccggcatcgcctttttattcactcggcgggcatttggtttatcaactgcgcctaaaacaaacgcgaggcggcgcactaatggggtaattgcggccgatacgagcatcgtcgcaaatagaccaactataattttaaacatgggttgcattcaacttgcctactttctcttgcattctctttattatacaaatcaaacccgttaaacacaacaatgacttgatttcttaagcaaaagccaagcaccctgattatctgtcccgcacaatctgggctaataaggccgtaaatcgtggatcagcattaaagggatgaatgtaatcaaattgttcgccttgattatccataaaatagtcccgattttcaacatcaatctcttcgatagtttccaaacaatccgcaacaaagcccggggttaggaccaaaatttttctaacgccttcttgggctaatgactgcatcgtagtgctagtggccggtgttagccattcattcggtccaaacttagattggtatgtggtccgaaaagtttgtttaggcaagcgcgcctgcaatagcgcagtagttgcttcacactgtgcttggtacggatccccttttgttacgtacgactttggaatcccatggtatgacaaaataatttcgtcataggtttgcgtctgtagcttctgttcaatcgccgttgccatcaagtcgatatagcctgagcgttgataaaagtccttcacaaaatgcaaagttggcatgtttgattgttttaaataaaactgcgcaactacatcataaaccgacatcgtcgtagtcgttgaatattgcggatacattggcacgaccgtcaaatcatcgattcccgccgtttgaatctcactaagcacatcggttaagaatggttgactatatgacatcgcctcaaaaacttgataatcgggtaattcagcttgtaattgagcaacttgctgttgcatgtacacttttaatggggagccaaaccgctttgggcatcgcaacgacccgctgatcagctaagaaatgttttaaaaaatggcgaatttctttgacttctggtttatctggggtccccaaattaactaataacacaccttctttcatgataatgtcctccacaattttaattaaaaccaaaaaaagagcggggaacaaaattggttttgtcccccgcttcaatgttaggccaatccgcattacttcgcgtattcgaccgttcttgtttcgcgaatcacagtcaccttaatgtggccaggatactcgagttggttctcaatttgattcttcacatcacgtgctaagacggttgcttggtcatctgtgacttgttctggtttaacaatcacccgaacttcacgacccgcttgaatcgcaaaactatgatcaacacctttaaaactattcgtaatactttcaagtttttcaagacggtgaatgtagttttcaagtgattcagaacgtgcacccggccgagccgctgaaatcgcgtcagcagctgcgactaagactgagataatcgatgttgcttcagtatcaccatggtgtgaaccaattgcgttaatcaccgttgccggttccttataacgcgttgctagttcaaccccaatttcaacgtgggagccatcgacttcatggtcgagggccttaccgatatcgtgtaacaagccagctcgtttagcgagtgtcacatcttcacccaattcagcggctaaaatccccgttaacttggccacttcaattgaatgattcaagacgttttgcccgtaacttgttctgaaatgtaatcgaccaagaatcttgattaaatcaggatgcattgtgtgcacaccaacatcaaagattgcttgttcaccgatttgtctgatttgttcgtccatttccttgcgtgacttatcaaccatttcttcaatccgagctggatgaatccggccatcttgaattaacttctctaatgtcatgcgcgcaatttcgcgacgaatcggatcaaacccactaagcacaactgcttctggcgtatcatcgataatcaggtcaatcccagtcagtgtttccaatgtccggatattccgaccttcacgaccaataatccggcccttcatatcatcatttggtaacgtcacaacagttactgttgtttcagcaaccatatccgctgcactgcgttgaatagcttcagcaactaatgtacgcgcagtccgatcagcttgttctttagctgtttcttcactttctttgattaaaacagcccgttcatgttcaaggtcttgtttcgtttcatccaaaatgattttttgcgcttcatcatgcgataattcggcaatttcttgcaacttcgctttttgttgctcaactaaagtggcagcttctgcctgcttttcagttagctcttgtgcttgattcgttaaacgattttcacgttgctccaatgaacgttcttttttatccaacgttgcatctttgcgatccattgtttcttcccgttgaatcaaacggttttcttgcttttgtacctcactgcgtcgatctttcaattcattttcaatctcagaacgatagcggtgattttcatcccttgcttccaaaagaatttctttcttccgcgttgcggcttctttttcagctgctgcgattattcctgtggcagtcttatttgcaccatcaatttcacgttcgtgcgccttcttttgtagaacggaaccaactagtaaaccaacgattaacatgatgactgcgaggattaatggaaaagctaagttcattgtttcacctccgcatcatcaaaaattttgaattgcaactttcactgcaaatttttaaagatgttattatgtttagtttttcaacacatagttattttatagtttcataaaccgcctgtcaacttaaactatcggcattgcaaccgttttcgagttcagtcaatcaaatcgaccatcagaataattcggttaagcaatcaaaaaagctgaagcaaaataacttttgcctcagcttaatgattcttattcgtttgaatcgtcatccgtaaagacgtcgagttgtgtttcatcgctttcatctactgggacatccgaaataccatatgcttcccgaactttaagccggacttcatcttgaacttctggatgatcagccaagtaattcttcgcgttctcacgtccttgaccaatgcgttcatccccataggaataccatgacccactcttattaataatgtccttttcgaccgccatgtcgaccagttcacccgtttgtgagatcccttgaccatacataatgtcgacttcagccactttaaatggtggtgccaccttattcttaaccactttaatccgcgcacggttcccgatcatatcggtcccattcttgatggtttcagcacgccggacttcaagccgaacggttgaatagaatttcaatgcgcgaccaccaggtgtgacttcggggttcccgaacatcacgccgactttttcacggatttggttaatgaataacgcaatcgtctttgttttattgattgttcctgataatttccgtaaggcttgtgacatcaagcgggcttgtaacccaacatgcgcgtcacccatttcgccttcgatttcagcacgaggcactaaggctgcgactgaatcgacaactaaaatatcaacagccccacttgaaactaaggcatcggcgatttctaagccttgttccccagtatctggttgtgacaagagtaaatcgtcaatattaaccccgagggcagttgcatacttaggatccattgcattttcagcatcgatataagcagcagtcccaccttgcttttgcacttcggcaacagcatgtaaggcaacggttgttttacctgaactttcaggaccataaatttcaacgattcggccacgtggatacccacctacaccgagcgcttcatccaatgcaagggaaccagatgaaacagttgagacttgtgtatcaaccttttcacccattcgcatgattgagcccttaccaaaattcttttcaattttctttaatgcagcatctaaggctgcttgtctttcatctttagccaattaagtgccctcctcaaaagagtccttttcagtactctcttagtttaccgatttcacgaaataaaagcaagtaaaaatcgaacaaacgttctatatattttttaagctactctactatacccgaatcaccgcgtttttttcgtgctttttgggttaaaaaaactggcgtgggattccccgccagtttaagtttatttagaaaatgagtctttaaagacgcctctgttcttgatgaaataatcggtacccgaataaactgtaaagaacaagcaaacgtataacatgatctgtgccattggaatgccgatattgttaaagaagacgttgttgagtagcaatagaataatcgctaacatctgcgtcgtcgtcttaatcttacctggcatagctgcggccatcacttcgccaccttcgcttaataataaacgtaggccagtaacggctaattcacgccaaataataatcgcaaccacccatgctggcgcttgatctagcgccactaagaagataaatgctgtcatcactaataatttatcagccaatggatcagcaaacttaccgaagttggtcaccaaatgttgtgatcgggcaatcttgccgtccagtaagtccgtcaaagaggctacaatgaaaatcactgttgcaataatcgcactgactggaatacttgtcccagcgaccataatggctgtcgcaggcacatccaatactaaaatcaaagtaaaaatcggaatcaaaataatccgaaacatcgttaatttatttggtaaattcatgttgaagactccttaatgtcctttatttagccaatgttgctgtgaaattaatcgtccgcacaaacgttgcttcgttatttggactaaggttaatatcggtgccattaatcttcatcttcgttgcaggtgcattcccagtttgaatactaaattgcgtaacgccttcaggtaattcagcagtttgttcggcaccaactgcgacagaaccttgccaaatttgttggccattggccgttaagctgacccaagcagctgatttatcagctgagaacgtaatttggttggctttagctggcaagttcttaatttcaaaagcttgttgtgacccattaatgctggtcatcttcgccgttaattcttgcttcttagccttatcttcagcagctttcttgctagcttcttgtgccttactttcagaagcggctttcttactgctttcagcagacttgtcttcactactgttatccttcttaggatctggtttatccccagaaaccgtaaccgatgagcttgtttcgtttaacgtttcgcggtctttaccacggttgctgagcgcaatcccatagaccaccccaataatgatgaccacaattgccacaatcgtaatttgtgggacaaggttgcgccatttcgaccatttagaatctgttgtttcgcgcgtcaatcgggtttgattttcaacggatttttcaacatattcttctggtttcgtatctggtacagcatcttggtattctgccaacaatgcatcattatctaagcccactgtttgggcgtattgcttgataaatgcccgcacgtaaaaactgccaggcaaggcatcaaaattgccctcttcaatggcgattaaatatcgtttttggatttttgtgatttgttgtaaatcatcgagtgtgtagcccttttcaattcgtgcttcacgtaatttttgaccaatttcattcataatcaattccacccactattatcccagtatcattatccataattatagcatattggtacgtatgtgcattattaagatttctttattttaaccaaccaccattaacgtacaatgtctgtcccgtcatataatcggctgcaggtgccattaaactcaatacccaataggcaatctgcgctggggttgcaaaagcaccggccgggatctccgctacaacagcagcccgttctgctgttgtgaactgattgttcattttcgtatcaactgcgcctggtgcaaccacattaattgtgattccaagcgatgccacttcctgtgcataggcgttcacaaaggcggattgtgcgcctttaactgtactatatggcacttccattgcactgccccggccaccatagattgaaccaattaaaacgacgcgtcctaatggactttgcgctagtttcgcttgcagctgctgcatcaatagcattggtgctttaacgtgcacctgccataagtgatcgagtgccgttgcactgacctctggcaataagccatacgtcgtcgcacctgctgtataaatgaccgcatcgacttgaaaaagctggcctgtcaattttccaacagcgtcctcttgggttaaatcagcttgaagcgcaaaaaaatcctgttttgggtagtcttgcaacaattgcttttgcagcgtcgtaacccgcgtctgattttgatgatagtgtaaataaagcgaccaaccgtccgccgccatttcagtcgcaaccgtcatcccaatatcaccggatgcaccgataattaaggctgatttaggcatggtttgctccctccggtaagatgtggcagactgtcatcgtttcaattttgaaataatcggttgccatctgttgcaagtccgctaaagtcacttgttcgatcaaacctaagacatcaaatggactgatttcggtaaagaattcatcactatattggttcgcaatggcttctagcgaattgaacgcttgcaagtattcaccaattgcggctcttttaaccaacgccaagttatcctctgaaaagtcaggactttccgtggcatgttctaagatattaataatcgcatccgataattcttgggcattgtccgcatcgccaccaagggtcacaaaattaaatgaccgttgaatggcaaattcgtaaccaaaactatcatcaagtgtgccatcatcgtacaacttttgcacttgcgttgatgaatcaccaaatagcaattcaagtaacaagttcatcttcaactttgtttcaagtgctaactcacctgttccgtaatccgttaaacctttaatcccgaccatgctcttgctacgcgtaattggcatttcaagtgaccgatacggaatgatatcatgaccatcttcagcttcttcaggcaatgaacgtacaatttctgttggttgggcaaatgtttttgccgcttgattggcgttcaaccaatcaaccacttcatccggatcatcaatttgcccaacgataaagaggttcatattactaggctgatagaacgttgcatgtgcttgatagagcgcttctggtgtaatttgcgcaatactctcgaccgtgccggcaatatctgtccgcaccggatggcttgggtaaagattgccaatcactgtatagaataagcgccaatccggttcatcattatacatctggatttcttggccaatgatgcccttttctttttcgaccgtctcagttgaaaaataaggttcctgcacaaaatcaagtagaatatccaaattttcttgcaagtgactggttgttgaaaataaataactcgttcgcgtaaaactcgtaaacgcatttgagcttgccccgtagcgaccaaacttttcaaacgcatcgtaatcttttttctcaaataatttatgttccagaaaatgcgcaatcccgtctggcactgtcacataatccgtttccccagctgggataaacgtcttatcgattgaaccataattcgtcgttaagattgcatatgtcttatgataaccgctcttagggtatattttaacggtcaagccattctctaattcagtttcatagagggtttcacctaagcggggattttgtctaagcttcatctgtatcgacccctttcaggaagtaaatggcttgcaattgcatctttgcggcttgttcttgaaccgcttgtttagaaaccgccaagatggcctgtgtaaatcgctctgcatcaatttcagtttcaggcacaaacaaacgattaaattgttgttgccccaaataggccgcactatcgagactcgatttaaattgattaatcaaggccaacttagtttgttcaaagaccgcctgttcaaagtcacccgcgataatccgttgacgttgggcttcgataatctctaagacgcgatctttttggcgactttcaatcccagtctgtaccgtaatgacaccccgaaaagcatcgattgcacttgaggcatagtaggctagactcgctttttcacgcacattggtaaaaagtaacgacagcggtgtgccaccgaataaggcgttcatcaccattgtggcataataatcagcttgatagaagtaagctggcatttgataggccatgtttaacttgccttgttgcaccgtttgtacttctgttttagtttgcacttgtggatataacgattgttgataaaaaatcgttggcagttcagcattacgcggtgcaaatggcaattgtgccaaatccgcgaccgttttggcttcgtcgatattaccgacaaacgtcatttggacccgatcgtttgcaatcatcgattgataatacgcatatagttcatccggtatgatggttgctaaatcagctgcatccccataattgggaatttgttgcgtcgcatctttaaaatagagtttgcgtaattcaaccgccgcgtatgattgcttatcatcggcaacactttcgatgtaacgcactaagttctctttttcacggttaaaaatgaccggattgaactggccatcaaccacatctggatgcaataataattgcccgataaacgcaatcgcttgctcttgcaagtcgattgtatcccgtagatattgggggctcacaattcgcattgagatgctaaaaatcgccaagtttccttgtcgataggcattcatattaaagccggcaccatacatggcttgtaattcattcgcaattgcgacttggtcacgataggcttggctactagcacctagaacgctcgctaataatgagcgtcgggtcatcccatcagctgtgacgggcgcaattaattgaacggttaatctaattgttttaaattggttagtttgtaaaatattcaggtagacgccatccgttattttctgattcacgttatattactcctcactgtttcaacagttaaaatggctcttttcaacttatcctttttcatagcacggattctatcataccaaaaaaagaaggtgaactcaaaaaaggccgcgacaaaagtattttttgtcgcggcctttttcatttaatagtttaaccgagttccatcaaccagcgcctttcagttaatcctgaatgtcaatcaatcgctgacgcgcttattcgccattttaggcgatatttgacttatgtcacacgctattgttctgttggttcttctggtacgttttgtaataacaccttgcgtggcttactaccttctgatggtccaatcacaccacggctttccatctcatcaaccaagcgtgcagcccggttatagccgactctaaaacggcgttggagcattgatacgctagcggtttgctgtttaacgaccaattcgactgcctcttggtaatattcatcttctggttcttcagttgattgcttttcctgctcagtggttggaatcatttcttcgtcgtattcagccgtttgttgtgctttaataaacgacacgatactttcgacatcctgactcgaaatgaaggcgccttgcacccgtaatggtttgctcatcccgattggcatgtaaagcatatcaccacggccaagcagtttttccgcgccactgccatctaagatggtccgtgaatcaatcccactggatacagcaaacgcgatccgcgatggaatattggccttaatcaacccagtaataacatcgacagatgggcgttgggtagcgacaatcatgtgaatccccgccgcccgagccatttgtgccaaacgaataatcgcactttcgacttcgttgctggcaaccatcatcaaatcagataattcgtccacgatgacaacgatataaggcagtggtgcacctttaatttcgccgtcttcgttgtggccttgaatatactgattatattcaatcatgttccgctgacctgtatcggcaaataattgataacgtcgttccatttcttttacaaccttgttcaaggcgttcgcagcctttttggcattcgtcacgacaggaatcaatagatggggcacgccattatagacgtttaattcgaccatcttcggatcgattaacatcaatttaacttcgtgtggtttggcactcattaaaatacttgtgataatcccgttaattgcaacggacttcccactcccggttgaaccggcgattaataaatgcggcatcttggctaaatccgacatgatgaccttacccgaaatatctttacctaacggcacagcgagtggtttgcctggatgtgggggttcttgttcaatcatttctctaaaggaaacggtcgaaacggtcgtgttcggcacttcaatcccgacatacggtttacctggaattggtgcttcaatccgaatatccttcgccgctaatgcaagcgccaaatcatccgctaagttaacaattttagagactttcaccccaactgccggttgaatctcgtacttcgttacggctggtcccagactagcactcttaaccgtcacatcaacaccaaacgaatcaaatgtttgtttcaagacctgttgattcttctcgatggctttatattccgcactctgatcagacgccggaatttgcgttaataatgctggtgttggcaattcgtaatcatcatccgtctcgttcagtggtgcgagttctgccacatctggaacatgctcatcttcgtcagccaccggttcgggtgcagttggttctgcttgcgtcgcaattggttttggtagatccttgggaccgtttattttaaaaggttccaatttttgcttcggtgcattttctggaccatccgttgcgaccatttgctctttagtctctgacgtctcttctgcttgttcagttgcattttgaacagctttttgcgtctgttcttttaaagcactgacttgcgctttacctttttcagagaccttttggaaccctgatttcgtgtagccgccagctttaaagagcccatgcacaaaccgttgtgtactctgaacaacgacgctgaatggaatatctaagaaaacaaaaacgccgataatcacaatcaagacggctatcagataagtccccatctgcgcgaacaagaagtggaaaacaccatacaacgcggcgccaattaagcccccgccaacttccgtcgtaacggccatcttctggaagtcttccaataaaagctgccatgtggcggccaagaaatggttattgaccgcttgatggtgcaagacgaatgctgacaaccaaattaaaatcccgagatacgcgattgcaaatccaagcgtcttttggtgccataaggggggctgcttgccataaatcaacaaatagacccccaaaagggcgaataaaatagcactaataatgaacgtatcgccaacaaacagacggaatacgttagcgcaaagcgcgccgataaagcccagctttaaacccgcaaataaactaattaaaataaaaataaacccgatgatgttaactgtgaaatcagtttgttgttttttctttttgcgtgctgctggttttctttttttacttttagtggccatgaaaatctccttcaaccttaaatcctactatccattatacacgaacatctgtactactaaacccataaatgtcagtcccgtaccgtttttaatcacggtactaaaaaaggccacggcaaaattgccgcaacctttcgctgattagtcttcgttggcttgcgctgtaaattggagttgaacgccccgatttaaagcaaccgccgtcacttgatacgtcaatgtttcgatgtattcaatcaatggtcgtgaaagcttcatcatgtctttttgatcaatttcatttggttcaccaaagaaatctaagagttgaaccacttgtgaaatttgacctgacactgcaaagccactcttttctggtgcaacttggaaaggcgtcacaatttggtaaatattccccgcgctcaaatcagcttcttgtaaatatggatcttcttcgctgatggtgactaagctgacttggatattttgttgtggttctacatcaggtgaaacacggtcataatgaaaagcatcaacagtaattggatctttcttcgtttgcatcaaaaacactccctattttaatttatcattgtcgtacaaatgactcttttcgagtcctggaaaatcttgttggcgcaatgcctcaaagatcactaatgccgcacagttcgagaggtttaatgctcgaatatggtcggacattgggattcgtaaacaccgatcttcattttcacgcatgaaagtttcaggtaatccggtcgtttccttaccaaacataaaataatgatcaacacttgtatccgacacatcttgatcagaataagcttgcttagcaaacttcgtaatcaagtataaatattgacgatcgggcacagttgctaaaaaggcatccaagttcttgtgataattaatcttaacttggtcccagtaatcaagaccagcccgttttaaatgtttatcatcggtttcaaagcctaatggttcgattaaatctaaaacagtatctgttcctgcacatgtccgcgcaatattaccggtattggcaggaatcagtggttcgtataatacaatatgattagtcacggtctaaacttccttaaaaaagattcagtagattaattatacaatagaattcacaaaagctctaccttgctttgcaaataaaaaaacgtagtccctcggttattcacggcgagaaactacgttagtgtcatttcatcactagcttttatcaaaataaattctgataaaagttagggaaaaaattccttaaaaacattatagcgcccttattttagagttgcaatcagatttttaaactttctttaaattctcatcattttcccactaaaatcgtgacatctaatgaaatttcaggtagcgcttctaacgtgattgccgctaattgtgccttagaagccgtccacgtcaatggcgtcatttcgaccaaatcgcgcaatgtctcgggtgttaacgtcattgttttttgaacttgcatttcttgataatctggaaaatgttgcgcaaacaattctaagaccggaccatgatcatagctttccttagcttgaccatgatacagtaactcccgtaactcatgtaagtaacccgcattgggaaccaccttaattagttgaccacccggtttcaagacacgtttaaattcttgatattgcgaaggcgaaaagatattgagcaccgtatctaactggtgatcagcaaatggcatccgcgctaagtctgctgcacaaaaccacgcatcggcattgtaatcacttgccaattgaatcgcaggtttagaaatatcaaacccgatataacgcgcggaaacttgcgcattgagctgttgcactggcgttccttcaccacaaccgacatcaaggactaaactatcgggggtaatccgtgatgcaatttcttttaagaacggttgaaagaaccctgcttgtaaaaaagcccggcgatgttgcaacatttccttggtatattcagacttcatttgctttgctaaaaaatataacgtgccatttttagcgaggtcaaaactatgcccattgacacaaagtaattggtgctcggctacacttgcaaatacgtcctgacagattggacattgtaatacggccaagttcgtcgttaaaaactgcttggctaactcaatttttttcaaatttctgattctccttgatttaacgtgctttcaaaagcatcccgttccggttagctacattagccaaacaatcggctacgccgcttattcgtctaattaggctaatcctcacaggataaccgcttttgacgcacttcttttcttaacgtactttcaaaccatccttttgcggttaactacgtccagcaaacgatcgacgctgtcgctcattcacgagactaggttaatcctcaaaggatacccggtttgaacgcacttcttttataccgcactttacattcttaaaatatccagtagacttaacagtaagttattgatgaaggaagtgacaccatgctcgaaacctatcgcttcgacagtgctaagaaaaagctcaccaaacatgctaaaatccagtccaacagttggattaacgtaactgatccctcgactgaagaaattgagcttctcactaagaagctccacatcccatctgattttatctactatagtttagatgctgatgaaagtgcgcgtgctgagcacgatcctgattataatgcgaccctgattattttcaacataccaattcttgaaaaagacccgcaaaaaccagataaatacctctataaaacaagtcccttaggaattattgtaacagattcgaccgtcttaaccatcaacaaaacgccagtcacctttttacagagctttgttgatggccaaattaaaggtttcaatccacaaaatcaccgtagaagtgtcctccagattctcttccgcatttcatccatctatctccaatatttgcgggacatcaaccgctctcgtgaacaaatcgaaactcgcttgcagagttccctacagaatgaagaactcttcgatctgatgaccattcaacgcggcttagtttatttcatgatgtccttaaagaccgataaaatggtactcgctagtttaatgcggaccaatatgttagatcttaatgaagatgaaattgaattgcttgatgatattcagattgaaaatcaacaagccatcgaaatggcagaaatttccaacacaattattaacgaaacagccgatacttactcgtcaattattaataataacatgaatagtgttatgaagttcttggcatcttattcaattattctcaccatccccggattagtatttagtttttacgggatgaacgtggaccttccactgtctcgctccaaaacaagttggttgattactttattcatttccctgatcatttctggtgtgctagtctatcgcttctggcgcaagcggtacattaaatagagcgtgtgccagctcctgcggattagaacccgtttaacttacaaaaggccactatcatcaaacacattctcccattctttgggttcgaatgtgttttttatttgactttcataaaaaagctcgttattatacgttatgcacggataaattccgtgttatccaaaataaatgttcgtttttaaggagaattcccaatggacgtatttgattacgaagatgttcaactgattcccaataaatgtattgtgaaaagtcggagcgagattgatactagcgtccgctttggctcagaaacgtttaaaatcccagtcgtccctgctaacatgcagacgattattgatgaaccgcttgccatctggcttgccgaaaaccattacttctacgtcatgcatcgatttcagcctgaaaagcgtcccgcattcatcaagatgatgcacgagcgcggcttatttgcctcaatcagtgtcggggttaaagacgatgaattcgactttattaatcaactcgcaaccgataacttactaccagaatacattacaatcgatatcgcccacggccactcacaagtcgtgatcgatatgattcaacatatcaaaaaagtactgcctaagagtttcgtcattgccggcaatgttggtacccctgaagccgttcgcgatttggaacgcgcaggtgcagacgcaaccaaagtcgggattggccctggtaaagtttgcatcaccaaaatcaagaccggctttgggactggtggttggcaactggcagccctcagatggtgcgcgaaagctgctaccaagccgattattgccgatgggggaattcgaaccaacggtgacatcgctaaatcaatccgttttggcgctagcatggtaatgattgggtccctctttgcaggacacgctgaatcacctggcaaattagtcgaagaagatggtcaacaattcaaagaatattttgggtcagcttcagaattccaaaaaggcacacaccaaaacgtcgagggcaaacggattttagtgccttataaaggtgcgattagtgacacgctcaccgaaatgcgccaagacttacaatcatcgatttcttatgctggtggtaaacgcttatcatcattgaagaaagtcgattacgttcttgttcgccattcaatttttaatggtgacatgctttaaaaagcagttaaaagagccagactaccttttaaatcggtagtttggctctttttagttaggtacctaaaacttctctgaaatggttgaatccgacttgaaacaactgtataattacccgtgtcgcttttaaccttagcgtctacattgatcagaaaagggtgtgaaacaaatggatattaaacatacacttggagataacagtgttatctttcgtgatgcaacatacattagaagaacggtgtttgtccgagaacaaaatatgccggaaacacaggaaatcgatgcgcacgaagatcacacgattcactatgtaggttacctcaatcaagacccagcagtaaccgcacgcgtgcacgtcttaaaagacggtggatttagaattcagcgcgttgctaccatcaaagctttccgtggccaaggactcggctatcaattaatcgaagccatcattgaagacgctaaacgcaccacaacgccttatattattttattcgcacaggaccacgccattggtttctacgaaaaattaggctttattgtcacaagcgaaggcgaaatggaagcgggcatcccccaccactacatgaaattaacgctctaaaaaccaaaaaacgcacgatccgcatttattacggatcgtgcgttttttattgctcgtataagcctgaaactgacttgaaccattcaaaaaggtgactaattaatatcttgataatcgcatatactggaataccgagaatcacaccggcaaggccgaataactttcctgaagccagcaacacaatgattgtcgtgaccggatacattgccatcttgctccccaagaccaatggggaaactaaacgaccttccaaggtctgttcaacagcaaacacgatgagtactttaatcaataataacggcgagataaacgctgcaataatcactgacgggaccatcgctaggaaagagcctaaatacggaattaagtttaaaatccccgctaaaattcccaacgtcaacccgtacttcatcccaacaatccagtagcctacagtaaacatgactgcaacccaaaacgctactgtcaattggccgcggatgtactgactgacctgtgtgttaatttcttccaacactttcccagttgtggcgcgtactttaaccgggaagaattttaacaaatagcctttcattcggtgaccatcttttaacatgaagaataaaatgaacggcatcgttacaatcgcgatgactacgttcgtcaccactccgaccgctgttccaatatgactaacggtcgaagtcagcattttatttactttacttgataaattactaaacacatccgtattgatatcgtttaattgtttttgaatcgatttgaaggctgggtcgttaaaccatttcatcgtctgagtttgaatattcgcccaataagacggccactgatcaattaaactcgttgtctgggattgaatgattggaataatcgtcgcaattccccagaccagtaagccaacaattaaaataaaaataatcgtaatcgacaatacccgatttaaatgccaacgccgttcaaaccaatcaattaacgggttggtcaagtaatacaagacggccgcaataataatcggtaacccgataatcaacatcaacgactgaattggttttaacagccaagcaagttttgttaataaaagtataatcagcaacgttaataacatgtttaacaaaacaatcggtagcttcttatttaaaaaccatttaaagaaccatgaacgttctgtttgtggctgtttattctctgtcacaccaattcacctaattcctacatagtttcttgatacgttatctgcgttcctactttgaattcaggaacagccggaacacccgcggcggctggtgttaaataaagcccactttgcagttgatcttcttgtggcgcaggtccaaaaactaaagcgacatgaccaatactgttgaggttaggatttaccaacgcgcccacatacgtaatcgtataaggttgttgattaataataaccgtagaatctgtcgtcagtgttagctgttttttggccgcttcgtccataaaatgttgaatcaatgccacgttttgaatggcagttgtcgcatgttcatcgaataaaatgaccatcggttcttgatcatcaatggcgtcgttgccaattgaaatgacttctgcttgcgtgttcataatgaaatctcctcttagttaagatagtatcattgtagcatattcgcgacttagttttagcgactagtgaatccttttagtaacaaattaaatcgttttcgcaggaatatgctatactcaaagagtatttgacgaagggagtctgattatgacagaagaagttttaattggtggttatacccgccggattggtaaagggatctaccgcggaattttcgatgcaacaactgcaaccgtgagtgacatccaaccattcattaatctcgataacgcatcctatttaacgatttcaaaccgcaacatcctctacaccgtcattaaagatggggaccaaggtgggattgctgcctatgacttagctagtggcacccctgtctttttgaacgcggtcttagcagccggcgcaccaccagcatacgtggcagtcgatgaagaccgccaactcgtttatgcagccaattaccataaaggcgaaatactcgtttatcaaatccaagccgatggcagtttaaccttagcgagcacgacagttcatgaaggccacggtccgcgtcctgaacaagctagcgcccacgtacattataccgacctaacacctgaccaccgcttagtggtctgtgatttgggcaccgatgaattagtaacttatgccgtcgacaatgctggtcaattaaccaaagtagcaatttacaagagtgaacctggttttggcacacggcatttagtcttccatcccaatcacaagacagcttacctattgggtgaattgtccagtgaagtgacggtcttagattatcatgcagccgatgggacttttagcgcggttgctacctactcaatgttacctgcagattggcatgaaacaaacggcggcgctgcaatccgtgtttccaaagacggtcgtttcctttatgcttccaaccgtgggtataattcaatcgttgtgtatgccatcagtgatgacagtcgccaactacgagcaatccaacaaatgtcaacggatggtgaattcccccgtgacttcaatctttccgctaacgacgattttctattagccgttaaccaaaatagtgataatggtacgctttatcggcgcgatgcccaaactggtttattaaccgcctgtcaaaaagacttagaaacacctgaaggcgtctgtgtcttattccattaaaataaaaaagattgaccgtattggtcaatcttttttatttacttcttttacgatccattaaattaataataattgcaatggcaattaacacaattgacgcaaaataaatgaagtgtaaaccattgtatagaatatggcgtaatgttggtaataattgtttaggtaagttcaaagcagtttctggattaatcaattcatttaacatgttttgatctaatcgaccatcaccagcaatcccttttgccaattgccgattcaaaataatcccataaactgaaaccatcaaggtttgacctaaagttcgacttaacgtattaaacgacgttgcaacaccaactttgtcagcaccagcaacgctttgtgccgtaacagtcgtcgtggtaatgattaagccaaagccaatccctaaaccagcagcaactaataagaagaaccaaaacggtgtggtttgtgggaccaatgctaagatgaagctcccaacaagtaaaatacacaaactaccggctagaattgttcgtggtgcgtgcttaacaagtaataggcctgcccataatgaggcaaaaatccacatcacagaactaggcgtcacaacaaagccccccatcgaggctttcaatccgaggatcccttgcatccacattggcatatagacttcaaaaccaattaagaaaccactcactaaagcagccactgcattttggacaacaaatgttcgatttttaaataatgataatgagataatcggatcttgtgcatgtttttcaacgcggataaagaggtaaaaagcaaccactgcaatcacgagcattgaccctaaaacgagcactgacggtttggcttcacccatgacttggaagccatatagtaaactcaaaagggccgccatcaaccataaactgccccaatagtcgactggttcagcactcgtcttcttctcttcttgaaggaagtaccagattaaaccaatcgtaataatcccaatcggtacattgatgaagaaaatccaatgccaggtcaacttatcaacaatgaagccccctaaaagcggcgcaatgatggaggcaatcccccatgctgacccattaaaacccaagactttcgcccgtttttcaatcggataaatatcagcaataatcgtaaatgataccggcataatcgccccggctcccaagccttgaattgcccgggaaataattaacgtccccatatgatttgacaatccacataaggatgatccgatgacaaacaaggccaaaccaaagatgaagattggtttacgcccaatccgatctgccatcttaccatagattggcgtcatcatcgcattcgttaataggtagattgaaaagacccagttcatcaatttcataccgtgtaaattactaatgatggttggcattgccgttgaaacaatcgtcccttcaatggctgtcatgaaagttgcgacgaaaatcgcaatcgtcacgagtaatacattcgtttttcttcccttactttgttccattcttagctccctctcttattcttgggtataaaaagagccttttcttaactcaaataagctaaggaaaggccgcctcttttactcgtctaataatacattaggcatttagtttagcaatacttgcctttaaggcatccactttatctaaacgttcccatggaaattcgacatctgtacgcccaaagtgcccatatgcagctgtttgcttgtatataggtctttgtagatctaacatttgaataatccctgctggtcgtaaatcaaagttttcacgaattgcagtttgaatcttttcttcactgacggtccctgtttcgaaagtatttattgaaacagaaacgggttgcgctacaccaattgcataggccaattgcacttcacacttgcgcgctaacccagccgctacaatgtttttagcaatgtaacgggctgcataacttgctgaacggtcaaccttagtagcatctttccctgagaaagcaccgccaccatgacgtgcataaccgccgtaagtatcaacaatgatcttacgaccagttaaacctgaatcgccttgtggtccaccgatgacaaaccgaccagttggattaatgaaatacttggtttgatcatccaagtatttggctggaataacggtttgaatcgcttgttcaagcatatccttttgaatggtttctaaagtcacatctgcatcgtgttgggtactgataacgacggtatcgacacgaacaggttgttcgttttcgtcgtattcaacagtgacttgcgccttagcatctggtcttagataagcgagttgcccgctctttcttaactcagcgactttgcgcattaaacggtgtgaaagggcaattggtaacggcattagttctggtgtctgatcgacagcaaacccaaacattaacccttgatcccccgcaccaatcttatcaagtggatcttcatcctttgcacgagattcaactgaatcgtcgaccccttgtgcaatatcaggtgattgttcatcaagtgcaacaatcacagcacagttatcgccatcaaagccataatgcccatcacgataaccaatccctttaatagtctctctgaccactttttggatatcaacgtatgccgttgttgaaatttcgccgacaactaggactaacccagttgtaacggttgtttcacaagcaactcgtgcttgtggatcttgtgctaacatcgcatctaagatggcatcactaatttgatccgcaatcttatctggatggccttcagaaacggattccgaagtaaataaatgtctttcttgcatttctatgtttccccctatatatgtgtcggttacaaggcctcttcacggtgtgtgaatcctatcgggaacttcttataactctactatcctagcacaaaatacaatccatttcaaaagccgttgaccttcttttcaaaaaaagttaagatgagacacatattctaagaaagaagtgttgctattgttctaccttaaccaacaacatctaaaggcttcaactcagccacaattactgactttgtttaattatttaaatctcggtttaatcgtcgggctgacaatgtggtcttttccaaagcaattcgggctttcattttatctaactgcgattctaggggcgctattagccattttactcgtcttatcaccccggtataaaccaaagcgaataattgcaactgctgcccttttagtcgcaattattctagccgcaatcatcggctggcgtgatctacctttgattgggcttctatcagggattactagcatttttgttctaatcccttttatctacccagaccagttcaaagaccgtacgttacggttatcatttcaattcttactagccccatttttctttttaattactcagattttcagtggcattcactttatccccgaggatttactcgtaaaattaggcctattcttaatcatcatttatcttctcgaactaacgactcacaatcggatgattactatcctcagttatgtagtatgggcgtgcattattattgcagtgattttaacgcatttaattcacggttggcatttaattctctttgcaggtggccagttattattaattgcgttacaactcggcctaatcaaacgtaactgctatttacaagagtttggatacttgctattaatcactggcgtctttaattaaaatgattaaacaacaaaaaagcgtaagcaataaattgcttacgctttttttaagacggtcacaacgggactcgaacccgtgatctcctgcgtgacaggcaggcgtcctaaccagctagaccatgcgaccgaatggaggttacagggctcgaacctgtgaccctctgcttgtaaggcagacgctctcccaactgagctaaacctccaaaaaaatgacccgtacgggatttgaacccatgataccgccgtgaaagggcggtgtcttaaccacttgaccaacgggccatgtcatttattatttaacggagagtgagggattcgaaccctcgaaacaggttagacccatttacatgatttccaatcatgctccttcggccgctcggacaactctccaaataatgttagctacatcttcaatcgttgtaacgttgttttgaccagataaaggaatcgaaaagtctggatattcactgcccggatcagtcaaatctgaaagccagtatcgtggttaaataatcaccgatttactcgtgttcgatttaacgctttcctttttctcagaaatacttgaactcgattctgaatcagaactctttgaactcgacttactatctgagcttgttgaagcactgcttgtcgattgtgattgcaacgaactggctaagctttcagaaactgagctcgcgccttcaattgcgcttcgtgggttcacaatcttagaagtcgtgttggctgtcaccgtctccttattcacagccaccactaatgcgctaccaaatgactgtacgattgtagtggttaagaaaataattgctaaaattagatggacgactctcttttgcatatcaaatttcctcccagttctaatgcctttaaaactttgttacatgataatttttcgatattttgactatgttcatcaggcataactttgacggtatcactacttccccctaggctagactcccaagaatgcctatgcaggggtgaatattagtcatctaaccatcattacccaagaacaatatgtaacgatataagaggttcacaactcatgagttatgacctactatcatggattttttaaagtcattacgtctaacttaattttgcttacaaatgttgatataccagtaattaagctggattcagtccaaaacaaaaagcgtcttccaaacattattcgttggtgtctggaagacgcttttttaacccttattgtcctttttgggttgtttctgcggttattggctcgatttggtattctttttcgatattatgggctactcggttgaagcttttcatcatttcgcgccgggtaacaatccctgtgaactccccttcatccgaaatcacaggcagataggggtgatcaactaagagatggagcgtttcttcaatatcatatggatctctaatcgtcacgacatcggtttgcatgacatctttaacggtcagcttccgcaaattttcgaaactgaggttattcaatccgagcatcgtctcggtaattaacggcatcgtcaacatccctttgaacttcgaatggttgtctaagacgggaatgctcgaatatttcaccgtggttagtagaataaacgcatgttccaaggagttgctttcttgaacactcgcaacaacctcaccgggaattaagaagtgttctttattttctaataataagttcgaaaatgcatctgaaatcatcacttggcctccaataaactaatgctacttttagattgtaacaaagagcaaacataaaagaccatccatagctactaaactttggatagtctttagaattaggcgcgtttaaatgtaaagtgtaactgcgaaacgggttcgaaccgacgattgtagtactggatttgatattggtcaggtgtgacgtctacaacggcgtatgtccctttcaagtcacgaaactgcccccgtagttgggcaatgctgccagggttcaagagcagcacaccttcgtgcatttcacaggccaattggtgtgtatgcccatagaacgcgagattagcttggctttcttgggccgctaataaaagccgcattaaatcgccatttacaccatacaagtgcccgtgcgttaagaagattcgttcatttgcaactgggacaacaacttgtgctggaaattgaccattgaaatccatattgccttgcacaacggtcatttggttaaacaagggatcatcggttgttaattcagaatccccgcaatgtaacatggttactggttgatcttgatactgcgccactaactgcacgagaatatcgcgatcaccatgactatcactcacaacaacaaaacgcatactaaacagtcctttcggcgccaaggggcgttgtttttttgaaacgtgcttcttccgacatattcttccggctagctacatcagccaaatctaaacgtgatcctgccgtcgcacgctagtttttgatccattctttccatttatcttctaggttctcaattgcttttgcgcggtggctgattttatttttttgttccaccgtgagttgggccatcgttgcatctaattctggcacgtagaaaagtgggtcatagccgaagccgttatccccacgaggaatacctagaatttggcccttcacgttaccttcaacgactaaatcttcatctggtcggtctggtttagcaaaaaccaatgttgtatggaaggttgcggtccgcttttcagcaggcacacccgttaattcatagagcaacttcgcgttgttgccggcatcgttatgatcaccagagaagcgtgcagaataaattcctggacgaccacctagttcatcaaccattagaccagaatcatctgccaagacaggtaagtgtaagatcgctgcaatttgatccgcctttaggcgagcattttcttcaaatgtcgaaccagtttcatcaatgtttggcaattctgggtaatctaataatgttttgatttgaatcccttccgctgcgaagacggattcgaattcgcgggccttacctggattcttcgtggcaatcacgattgtttgttcatcggtatcagccacttggatattcggttgaacggcgcgttcaaaactggcttgacgttgatcattggttcgcgtcacaccttggctcgcacgtaaaataagttcgttgaattcactactattgactgcttgttgtccgccgagttcaagggcgatgatttgttcctgcggtgtggccaccatcgtcaccaagctagtcgctaggtcgctttccgcggcgtctgggtcaccgagtgactcaccagcgaccatcgctgctgtgacggctgcagcgacttgtttggggcctttgccttttggtaataaggttagtgcgcaataaacagcgttgaagagttctgctaataagccgccaccatcttcaagacaggttacggtgatagtgagtgcttcggttgccaataaggggcgtaatgtcgtttgcaaccattctaattggtgcgctgttatgccattgccattgacttgcaaggaaccttctgtaggttgaacagcagcgagcactttggtatcaccgcgttgccatagaacagaagcgggttgttgctttagaaaacgccaagtgacttgcactggccgtaaatcattatcagcacgattattcattcggaccatcgtttttttcctccttaatgataacttgttgggcttcaagggttgggattgctaaccattgacgcgcgattgcttcgaaattggttacagatccggtcgtataggtgtgtagttgcccagctgttgcatcggccaccaactgattgcgatcttgtaatgcctgaatcaaactatcaacagcggcatgcgcggggtcaaccagcgtgactgccggtccaactgtcttttgaatcgccgcggttaataatgggaagtgggtacagccgagaattagcgtatcaattcccgtcccgcttaatggcgcgagggtttcgtcaaccgtgttttgcacagtttcgccactcaattggtttgcttcaatcatcggtacaaaagttggcgcagccaaactcgtgacgtgtgtcgccggtttgagtgcctttagttgataggcatatgcgccactgttaatcgttccggtcgtggcaattaccccgacatgccgattacgggtcgttgccaatgccgcttggctacctggtgcaatcacaccgattacaggaatcgtcaattgcgcttgtaaatcaggtaaggcggccgccgttgcggtattacaggcgacaaccaatgctttaatattttgcccccgtagaaaattggtcatctgccacgcaaatttgcgcacggtttccgccggcttttcaccatatggtaggcgcgcttgatccccgataaagaccatgtcttcgttgggtagacgtttaagcgcctcttttaagagggttaggccccccacacctgaatccataaaaccaatgggttgtttttgcatattagatttctcttttcatttcaggatacactcgtaacttctattttctcttttttcggtgcaaaattcaactaaaacaacgggcacggccggcaattcacagttggcgttaatttttataaaaaataaagagttttcgcggtataataggagtacttataaaaaacgaaccataaaggagtgccactgtgactcaatcacgctatgaacaactcgcccaaaatccacaaactgcatcatatctgacacaggcaacattacgggatatcttgttaccatcaattcttggggccgaaaatgacgccatcagctattgggccggtaagcaactcgctttgcaattcccactcgattctttcgaagacctctgtgccttcttcgaacaaatcaacttcggccatctcagtcttaagaaacagaagaaggaacaatacttcttcgaattaacaggcccgattgtcgcttcacggattgcggatttcgatactcctgacttccaattagaagccggcttcgttgcccaaatcctcgaacaacaattgcggattgtgactgaagccaaagcaaccattgaaaataaaaaaaacgtaacgattttcgtccaaacagattcaaaagcaccaattgaagacgaagcagtcgaagccattcatttaacggttgatgcatcacaagtcgcatctgtaccaagtgaatcagaatctgttgaagaagaaccagcacctgtgatgacacaacctgttgaagcagcccctgaagaagtggctgctcccacactagaaccagaatccgttccagaaacaccagttgttcctgaaccggtggaaccagaaaacaagccaacttctgaagaaacaccacactacacaagaacccgcgtggcagacttaccaagtcgacgagaaatgcatagaaaacacagataagcatgtgctataaaaaaagggtaggaacaaaattaaattttgttcctaccctttttgaatacttagcatattaaacgtgttaatcctcaagtgataaccggctctgtctcactctaatcaaagtcatggacgttattgccgctgacgttttgccagtcgcgacttaagaagtcgtttgacatgtcatagtgcactgtttttgcttttttcgttctcatgaatggttggagtttttgatcaactttcaaccagccacgccagccaagatgaatcgtatcttgcatgaagaattgttcattaccgtcgttagtcatatcaacaatgttgttgaagccttgcgttctcaattgatattgaatcttcttatcaaaacgattcaacatcgcttgtgagagccctgtataagcggcccaacgcgcattaacgggtggaatgatgaattgaacagatactttatgggctgcgaagtaatctaacatcaattggaaatcagcaaactcaggtgaactttcatagttaaagtgactttgttcacccttcaatttaccaacattgggtttaacccgttttttgtaaaaactattttgaatgccaaacggattatcacccgttactttttgtcctaattccgttgcgacttgatcaagttgcatgttatcaggttgttttggtaacaccttcaagcctttacgcaattcgcgttcacgaccccgaatgaataattggctgaagagttgatcttgatgttgtaacgctgggcgtttcacattattaatgtatactttttgcgtctccgttaaaggtatgcctaaagctttgttcttcaatgcatcccgcattaccccgttggttgtatcacttgtgagttctagaattcgtttcgctgcataccgcgtactttcagaatccttcgcgtggattaagaaataactggtttgtagtggtgaatagaagaaatcgaacatctcaggttttaccccttgtggtacaaaccattgtggcgaaataacgacgacggcctttttaccgttcaagtgattaccagtcgcttgaagtgataaaaagtgggtcaatgactgagtccctggtgcccctagtaggaatggcttattttgccaatcatacttgtttgccataacagatggatgtaacgcgtccattcgggatagttcggatgaaccaatcatcggaatgtagttgtcgttaaatgcagcatctttgatggcttccccttttagcacattggcggataatgacgtcgccgctgtcgacaacgtcttttcgctaggtcgtcctaatcgaagaggtgatagtaataaggctgttaagcagagaccggccactaaaaccgggccgaaaatttgccataaacgtttaaacattttattgcaattcctttacgcgagcaatgatcttgttaggtgttgaccatgcttcacgatcgaattctgaaacaggtacttcaatatctaattggccttgtaattcaagtaacatttgcacagttgccattgaatctaatgtccctgattcgaataattccatatccatatcgtctttaatatcgtcgttccctgttaaatctgctaaaatttctactactgtattttctacgtccatgattaaatcgctcctttagtgtgtaggtcttagtggaaccataaccggtccaaaaagcctgagaaaattagaaaactgagacaaacggtgttaaacgttgcaaaaattgctaagtagttcgtccaccgattgctgataatgtgatccttgtgtttcttcttgaaacgcaaccagacatcggtaaggatgatccagatggcgtggaacaagccgtaaacaatgtagtaccatgtcaacccatgccagaagcccatcaataagaagagtgttaaatagccgagattggcaatgaggaccttgttcttggtaatcttatgtttcatcaagaagaacactaagcgcatgtagatgtaatctctaaaccagaatgataatgtcatatgccatctattccagaattccttgatattggttgatgcaaatggcttgttaaagttaattggcgtttcaacacccatcacataacttgttgcaacagcgaataaactgtagcccgcaaaatcgaagaataaatacatactgtaaacatacatgtaaccaacaagcccccatgagatatcaaggaacccaccgcgactcgccattgctaaatgcgcaactttagggagtaacacggtcccgaataagtaaccgagcataaacttatacacaaagcccaacatgaagttgtggactgccttgcccagtaagtcgagataatggtcacgatcaggaacttttaggtaatcttttttgaaacgacgataacggtcaattggtcctgatgaaatcgtcgggaaaaatagcataaattgtaagaataaccatggttcaaatttcttaatactgccatcacgggtttccataatcatcccaactgacttaaatgtcagataactgatccccaagaagccaagaattgaattactacccggatttaagaatggcacgaacttgacaatcactagcggcataatcgctaagataacagccagatcgaatagccaggtgttattgtgcttttgacgatagacagtgtatccccaaatcagtgctccttcgaacaggacgtaaccaatcaaggcaattccctggtgaaccttatccccgtcaaagattaggatcaaaaagagcagtgagacaagtgtctcataaacatgccaacgtttgccgttaagtaagccaatcactaacggaattaacgccgcacctagaatgagaaagtagttcggattcgcgtacggttgtaaattaggcattgccattaacctctttaatcaacgctttacgatcaatcttcccattgacggataatggtaatttttcttgataaacaaatcgttgcggaatcatgtagtccatcgtattttcagcgagttctgcttttaacgtcttcgttaaatcattgcccgcttcttgaccgtctgctggcacaacataggcaatcaattgggtgacttgatgggctttgttgtagcgcggtacggtacatgcttgatgaacggctgctaattggcttaagtggtggtcgatttcctctagttcaatccggtaaccgtgcatcttaacttggaagtcggtccgccctttataaaagagcaagccatcttcgttttgggtgaccaaatcgcctgaatggtagaagcgttgcccgtctttttcgaagaaggctgcagctgttttttcaggattattcaagtacccttttgaaacacttgggccactgattaagagttcaccaggttgaccaactgcgactggattattctgttcgtccactacgacagtttgagtatcagcctttgtgtagccgattgggagtcggtcgtaagtcgctaagacctccgccgtaatttcgatgctcgtcatcgcaacggtcgcttcagttgggccgtatgtgttgaagatttgcgcatcaccgaaacgttcgattaactttgttgctgtttgatgcgttaattcttccccacagaagacgaattgttttaattctgggaaatgttcactatcaaatgttggtgataataagcagatttctgcaaaagatggtgttgaaacccattcgttcaccttaagagttggcaagacttcaaataacgtcttgaagttgtccgtcacagctttttctaaaacgacgagggttgcacctgagcataacccgggaaataaatccatgactgataaatcgaatgagtatggggcttgaattaaaacgcggctgttatccgcaacattgaaagctgggttggcccagtcaacgaaactttgtaaattgctttcgctgatttgaacgcctttaggtaaccctgttgtccctgacgtgaagatgatatagaaattctcattcccttgcacactttggctagcatcataatcggttgctccgtttgcaatcacatctgtcaattgaggttctgcgaaaacgggcatattaacatcaatcgctgtttcaccagcccatgataggacagtagccggcgttgcgactgattcaatctgtttaatccgcgctggatctgaatgttgttccaccggaatataagcatggcctgctttaacagcacctagaaaagttgctaccatctcgaagttttgaccaccgaagataatcaccggtgctttagctggcaagtcttggctttgaatgaaatgagcaatccggtctgaagcagcctttaagtcggcgtaagtgtgttgcgtcgtgcctaattgataagccacagtttgtggttggtcaattgcaatcgcatcaatttgttgaatgatattctttttcattttaacgacgctccttcattagaattcattgtagataaatttaggactaccgataccactgtaatcatataaataaagtagaattagcagaataacaaaataaattatggttttgccaatgaaattgacggccggtttattccaaaaattaagtattttttgacccattttttcaccatctctttctctctctttttgattttcatcattttgttcatcattaaagttaccacaacgtttattaaacaaccactaacatttttgtcacacgctgtcacataaaaaaagcacctactaaatagtaggtgttttcataattagtcggtatattgtgccaaaatcgtttctagttgttccttattatggaagccagtaattttttcaacaacttgaccatcttttttaaccactaacgttggaatcgccataattccgaaattagcaggcgtttctggattagcatccacatccattttactgaacttaactttgtcgttagtttctgccaatgattcgataacaggtgattgcatccgacaaggaccacaccaagttgcccagaagtctgtcaagacaacgccactctttgtttcttcttcgtaatttttatctgttaatacttcaaccattattcttcgccctccattcaattgtacaaaacatattatttatcatgatactcctatatggcgtaaataacaacttaactcgcttattattcgttacaaacggattattttatccccgtttaatttaacaagcctaaaaaaacacccccaatcaaaaccagaaaggactggttggattgggggcgtaaacgtgctccagcaggcaaactcctccggttagctacaccagccaaacgaccaacaagttggtcattcgtctgcctatgctaatcctcggcgtataaccgcctgcttccgcactctatttgaatgttacgattgttgcgccattgccgcctgcgtttgctggggcgtattcgtatttcttgacttggcgattgccttttaggtagtcctggacaccttggcggattgcaccggtgccttttccatggacgattgtcacttgttggtagttcgctaacaaggccgcatcgacatattgatcaacttcagccattgcttcttcgtagcgtttgccccgcaaatcaagttgggctttaacataccgcgctccaccgctgttgacagttgtcacatgccgttgaggtcggttatcttcaacgactttttgtttctcaaggtcttcgttagcaatcttcatcttgataatgcccatttgaacttcccagttcttggcatcgatttgccggactaatgtcccacgttgaccgtatgaagtaactaaaacatcatcgccttctttaagggtttgacgtcgttttgcccgttgcaatactttgtttttcttcaaggttgtttcttggtgcaattgccctaattccgacttcgcatcgattaattgattttccttaatctgggcgccttgattcatctgcatatcccgcaacttggtaatcactttgtctgctttaacttcagctttttcgacgatcgcattcgctttttctttcgccttcgtcatttctgtttcacggtcttcgaagaattgttgataagcagttgataactgttgatgcaagtcagtcgcttctgctaattcatgccgcaaagcttggtattccgtttcggctgccttacgttgattttcgagatcggtaatcatattatttaaatcttggctttcatcgttcatcaattgtttagcttgttgaacgattgagcttggtaaccctaagcgcgttgaaatatcgaacgcgttactacgaccaggcaccccaattaataaacggtacgttggttgtaaggtagccacatcgaattccatgctagcattaatcgtttgtggccgattgtaaccgtaaattttcaattctggataatgggttgaggcaacgacatcagcgccaacaatcccaatttgatccaagatagcgatggctaaagcggccccttcttgtggatcagtccctgcccccaattcatcgagcaagaccaaactacgatcgtcgatatgttggagaatctgaatgatgttttccatatgtgctgagaacgtactcaagttctgttcaattgattgttcatcaccaatatcagcaaaaatatccgagaagacgccgacttggctctcctcacgcgcagtgataaataagccagattgggccatcacttggactaagcctaaggttttcaacgtaatggttttcccaccggtattgggacccgtaacaacgatggcctgataatccgccccaatcgcgatgtcattagcaacgactttagctgggtcgattaatgggtgccgtgcttgtttgagttcaacatggttttctaaattaatcagcggttcagtggcctccaacgctttagcaagttgagccttagcattgacgaaatcgagttgccccaataattcagcgttggctaaaatattgtggcgttctggcatgatggcttccgataattccgccaaaatccgttcaatttcttgttgttcttcaatttgtaattggcgcaagcggttattcaattccatgatggcttgtggttccatgaaaagggtctgaccactagcactctgatcatgcacaacgccgccgaattggccacggtattcttgtttaacaggaatgacatagcggtcatttcgaatcgtgacaatcggatcactcagatatttagctttagcaccgtgtgtataacttgccatccgcgatctgatttggccttccaattgttttaaaccagtccgtaagccacgcaacttggttgaagccgtgtctaaaacggcgccatcatcagcaacagaacttctaatcttttcagttagttgtggtaaagtcaccaattgggcaactaagtctggcaacgcctttaaggttaattcatctttttctaagtcatcaaagaaacgcacaaccgcagaagtcgcgcgcaaaacccgcccaacttgcgcgagttcggtaccgtttaaagtcgcaccgatttcgattcgtttcaagtgcggacgaatattatctaactgtggcaaaggaatgccaccttttagccgttcaatatcgaccccatctttggtctggtccaagcgttcttgaatcaattccgcatcgttagcgggggttaattgtgtgatttgttcttgaccaaacgccgtgatggcatggccttgaagcatttgtttaattttatcgtattctagtgtttgtaatattttatgattcatttaagttaactccttctaaaaaaggggcgacttccgtcagccccaactgcactatccattttagccagcaatccaccagctcgtcacttgagaggtgaggactggtgtgtgtaagacaatgacgcgcgcaactgtcgagttttccaatgtcttctgtaagccatcgactggcactaaagccagcacgtagaggagcaaaaagagccccacgtaaacgaccaagaaactcaagagcccaccggctgccttgttaaattgcttcaaacctggcatataagtcaatgaattcaacaatagtccgatgaagcgcaccaacaagccaccgataaacatcacgaggacaaaggcgacgccgatataaaacgcatcatcgagtgacaacccgatactcttttggaaaaatgcaaaatagctgtcttcagttgccgatgggtatggcaccattaaacttagcttaggccctagtgtttggctcatcgctttggcaatccaaaagacgataaagtagccaatcgtgtagacggcttgcatgataaacccccgtctgacccctgtgtaaatggcatataacagcattaagataataattagacttaacatgagttccccttagatacgcgttttgtggcgtggatgtgtgtatgattgattggataaagtattctgaaacgtgctccataagccatcttcttccggttagctacgcctcgcaaacaatcgacttcgtcgcttattcacgagtctatgctaatcctcagaagatacccagcttattgcgcactctgatttttgaaacgtgctcttgcaggcatatttctgcgcttaaccaaatttgccaaatcggcgattgcatcgccaatttgtcaaatccagttaatactcaaaatataaccgcctgctgtcgcactctttttttaacgtgctcctgcagatatactcttccggttagtttcataccgcaaacgatcggccttgccggtcattcacggtatgctactaatcctcagagtatgaccatctgcagtcgcactctaattttatttgctagttcaactgaactattttatcatgaaataagggaaagtggcaattttactccgaatctcttcatttgccactcattaaggagccaatcgtatgcaagcagtcattaaagtgacaccctcacaattaactactattcaaaaaaattatccgaccaaccgtcaactaccgccgggggccgtttttgcgcaccaagccaatggactaagcattaccggctataaatctggcaaagtacttttccaaggcgctagtgccgaacgagaagctgctaagtggggcaccgctacccctagcaaagcaaaatctgctagccgtactaagcctaaagccgccaaaggcgatgttttaccagctgattttgccaaatggtccgttttaggctcagatgaagttggtaacggaagctacttcggtccgctgaccatcgccgccgtctatgtcagccaagaaaatctggcgttcgtcaatagcctaggtgtcgcggattccaaaacgctaaccgatgcacaaatcgatcagatggcaatcaagatgatggctaaactcccctatcacatcgtcaacatcatgccaccgaaatacaatgaagtacacgccacaatgaacatcgaaaaaatgaaggccatcagccataatttcgcactcctcaaagtcctccaaaaaatccaacccgaaaaacccgctggcatcctcattgatcaattcgaaccacgcggcatttactacaactatttgaagaatgaaccggttgttttacgcgagaacgtttatttctcaaccaaggcggaacaatttcacctcgccgttgctgccgcttcaatcattgcgcgccaccaagccaacctatcaatgcttgaactgtctaaaaaagcgggccgccaaattccgctcggcaatcatcaagcagttaaccaaatcgccgcagatttactcgcacaaggtggcatcgattacctaggcgaattcgctaaattgcattttattaacacggaaaaagcgaagaaattgttatagagtgcgactacaggcggtgatattttgagcattaactggatttgacgaattggcgatgtaatcgctgatttggcaaatttagttaagcgcagaaatatgcctgtaagagcacgtttaaagtgcgtttaaagcgggttgactctgagcattagcacagtgttgtgaatgaccgacaaagtcggtcgtttgcgatacgaagctaagcacaagagtcagctttaaaaagcacatttcaacccacaccttctccacataaaaaaagggtcccgactgcaatttaattaattgctatcgggaccctttttgaaatagatggtgataacgtgctttcatcaacaacttcctgtgctttgctacacttatcaaatcggcgattgcatcgccaattcgctaagttaggcaaatgctcagaagttccccgttgatgacgctcttcttttctttaacgtacttttcaaaccatacttctgcggctagctacgtcccgcaaacgatcgacttcgtcgctcattcacgggactatgctagtcctcaaagtataaccggtttgaacgcacttatttcatgttgtcgtctgccaaaaatgtgtttagtacttcttcaaccatttcccattcttcgtcgtcttcgattgggaataggtcacctttgctggcatcgcctgcatcgtctgatgtgaatgagaaagcttggatatcaacttcttcatcttcttcagcgcttgttgggtacaatagcacgtatgatttaccgtaatcttctgaatcaaatgtaaagagcacttggtataattcctcgttaccttggtcgtcgattagtgtaatttgttgttcttcatcttggtggatgttcttgttatcttcagtcattcatcaaaactccttaattgttttatttattagccttgtgttaagcgaccgtgcgcgtccaagtagttctgcaaaatcatcaccgcagcaagcttatcaatcacttgcttccgtttcttacgtgacgtatctgcttgttccactaacatgcgttcagcctgaaccgttgttaggcgttcatcgatgtaatcaaccggaatctctgggaaaagttcactcagcattgccccgtattcttgcgctttaagcgcccgtggcccaatcgaattattcatattcttgggtaaccccaaaacaaaaccagtcacttgatgttctgcaaccaattccttgacgcggtctaacccaaattctgattcatcttcattgatgcgaataatctcgaccccttgagctgtccagcccaatagatcactaatcgcaatgccaaccgttcttgatcctacatcaaatcccattaagcgcattatttcgtcgtttccttatccaaataatttttaactaattcctcgataatctcatcacgttcgtgcttgcgaattaaattacgagcatcattatagcgcggaatgtatgctggatcaccggacaacagataacctacaatctgattaattgggttgtagcccttctcttctaatgtctgatagaccgtcgttaatgtttcatgaacattcttggggctatttttaccaaaatcaaaatggactgttttatctagattcatctctcaacacctcaacttttcgctacttatacaaccatattctactcgaaaacaggacaaagtacaactctcccctctcttagcagaatgcggatgagagataactataacacatttcgctaaattgattaacaaaaagaacaaaaaaataacgggattgcaatcaataaaaaattgacgacaatcccgttataagttaagcgttcgctaaagctgttttagcagctgccaaagcatctgcgatcccagctggattcttcccaccagcttgggccatgtctggacggccaccaccgccaccaccaacgagtggtgcgatttgtttaatcaaatcaccggctttaatccccgctttaatcgcatcaggtgcgaccgcgacaatcaagctaaccttatctcccgcaactgttgcgagcactaagacatctgaaatttgtttttgttgccattgatccgctaattgtcgtaattcgttcattccggcaacttttgcatcagcagccactaagcgccattgaccaactgtttcgacattttcaaaaacattgccagcttgttgttgggcaaattttgctttgagttgttcgttttctttttgttctgcttttaagtcagattgtaattgttgaatcttcttaggtaaatccttggtttgagcaactttcaattcaccagctaattcatttaataaggcttgtttgtcattcaaatacttgaaggctgcctttgaagtcacggcttcaatccggcgcgtcccggcaccaatcccagattcgctcgtaatcttgaatagaccaagatcagcagtgttagcagcatgcgtcccaccacaaagttccattgagtaatcaccgatttgaaccactcggactgtcttaccatatttttcggtaaagagtgcgatggcccccatttgtttagctgtttcaatatcggtttcaacagtattcacaggtagtgcagcccaaattttttcgttcacaattttttccacagtggctaattgatctggtgtgacttgaccgaggttcgtaaaatcaaaccgtaagtagtcaggttcaaccaatgaaccagcttgatgcgtatgttcgcctaaaacatcacgcaaggcttgatccaataaatgcgttgcggtgtgattcttaatgacgccaccgcggaaggttggatcaactgataagacatagtggacaccactaatcatttcttcgagcacttcaacggtgtgtaatggttgcccgtttggtgcgtattgcacgtcagtcactttagcgactacttgcccagctaggttcttaatgatcccttgatcagcaacttggccccccatttcagcatagaatggtgtttggtcaaagattaattgcgccgtaccactcttaatcgtttgttgttcggcattatcttgtaagatgacgcttaacttactttctgtttcaagcgttgtataaccagtgaaggtactttccactttgatatccattaaaagttcgttttgcatccccattgattgttcatcactacgggcattacgtgcacgtgatttttgttgtgccatttcactttcgaaaccagcttgatcaaccgttaagccttcatcttcggcatattcagttgtcaattcgattgggaaaccatacgtatcaaataacttgaaagcatctgccccagcaatttcactttgaccagcagctttgacactgtcaatcgtttggttcaataaacgtaaaccatcattcaaggtttcacggaaacgatcttcttcagaacggatgactttttcgatgaattctttttgtgctaatacgtctgggtaatagctttgcatgatttcaccaacgattggtactaacttgtacatgaaagcgtcgttgatgccgagtttcttaccatttaagatggcccgacgaattaaacggcggagtacatagccgcgaccttcattggccggcattgcaccgtcaccaattgcaaacgtcacagcccgcgcatgatctgcgataatcttgaatgaaatatcatcagctgcattttgaccgtattgtttgtggtcactcatcttagctgtcgcttcgatcaatggcatgaataaatctgtttcaaagttggttggggcttcttgaatcactgaaacaagtcgttcgaggcccatccccgtatcaatgttcttgtggggttgttcaacatattcgccgtttggtaaatggttgaattctgagaacacgatgttccaaacttccagataacgttcgttttcgccaccaggatagttttcaggatcatcttcgctaacgttgttgaagctttgaccacgatcgtagaaaatttctgaatcggggccacaggggccttcaccgatatcccagaaattatcttcaacttcaatgatgtgtgattctggcaaaccgactttttcatgccaaatccggtgcgcatcttgatctttaggataaaccgtcacgtataatttttcaggatcgaaaccaatccacttgtcgctggttaagaattcccaagcccatggaatcgcatcttctttgaaatagtccccgacagaaaagttgccgagcatttcgaagaaagtatggtgacgagcagtcttcccaacattttcaatatcgttggtccgaatactcttttgtgcattggtaatccgtggattattaggtacaatgcgaccatcgaaatacttctttagggtcgcaacccctgagttaatccataataatgtcggatcatcatctgggacaagcgatgcacttggttcgacatcatgacccttttctttaaagaaatctaagaacatttggcgcacttgcgcactggttagttttttcatcatgtttgctccttcaaaaaaataaaacaccgctgcaatttcaaggacgcaaaagcgcggtaccaccttgattgcaacgatgttagtcgttaacctctttatgagtttattgaattgtttgtgatgttggggagcacgtcaaccaatggcggcaccttctctcagtctagaaaggcgttcctgtctccgtcagttcgttgcgtatatcccaacacttccaaagtataaaaaagatttgctgaattgtcaactaatccaaggtaacggtaatcgcaggccgatagtagcactgaagcgtcggattgcccaatgccgccgtttgaatcccagattcataggcgggtgcttcaggcaaccattgttccaaactataccgtccccctgtcacacaagcaccacccttataaacaagtggatcttgagtaagttcataaccgtcagcggctgttgcttgtaacccaaatggcatctgctggcgctgagtcggtcgtggtaagtgattaccacttaaccacaacgtcttactccctgcacctttaagccattcatactgatcaacactcaccagatcaaaaccgcgccgccgcaatgtctggcgtagttcactttcgtcaccattagttttttcaaacacttggtaacaatctggtcgcccacccgcttgtaaaattaggtgcgcactttcaagtgtttcagctgaattttgttcccgccgcgcccgaaacaaggtattttggatttccgccaaaaactgacgcccaactagttggtttccattaaaacgtcctgttgtcgtttcatactcgccttggagtacccactcacttgaaattggtgtttgtgccactaacatcggtgccatattaacaatccgatattctgatgtcatctgatcaacgtattgatcgacatccgcttgcgtcgcccaaacgagtccttgatcaactggtaacgtacgtttagtttgtgcaaaccactcactcggtgctaagtgggctgcccctgcttgccatcccaactgcacattagcttggccggggataaaaataaactgctgcccagctagccgggcactgtaagtttgaaatacttgagtgccaatcgttgcggtctcactctgaatcgcttcaattggaatcagcgggctaacaaagtagcgcaacacctggccaaaattagcgcgccgtgcttcttcggataacgataaccagttcagtaattgtaagtcattttcatgcatcacagccacctcgattatgaattaactagctattttgcttcttgttttgacgtttcttttcacgtaattcaagtcgttgttcaatccggcgtttcttttgtgcatcttgtttaatggctgctttaatctttttcttataaccgggtttgcgtttaagtttggcctttttgaccatccctttcatgccgacatctaattcatgcgtggtagctacccgttttttacgacggttccgatcatatgatgtgaccaattcgccatctttaaatgtctttggtgtgaacttgatgcccattgcttcaatttgtgcaacggcttgttcatcatctggaccataaagcgtaatcgcggttcctttaagaccattccgaccagtccgaccaacccggtgaatgaagaattctaaatcttcacgtgggacttcagcattaatgaccatgctaatcccttcgatatcaataccgcgggccgctaaatcagttgccacaacatattgatagtctaagttatgaatttctttcataatccgtttacgttggcgtggtggaatatcgccatgaattttagcgactttcaagccttgtgattgtaaataacggtggatgtcatcaaccttgctcttcgtattagcgaaaaccaagaccatgaaaggatggcccatcgtcaataatgaataaatggtttggttgagggctttccccttcgttggcactaaccagttgtcgattgttgggctaatcacagtttcgtttttaacttcttcaatcacaggattgtgcatgtatttttgtaagaagggttgtaacttatcaggaatggttgctgagaagaccatcatttgtaagtcttctggcaaacgactagcgatgtcatcaactggcttcaaaaagcccatgtcaagtgtcatatccgcttcatcgatgaccaagatcttcgctgtataaatcttaagcgccttgctcttgattaaatctaaaattcgaccaggagtcccaatcacaatctgtggttgatgttgttcgagtttttcgatttggcgttgcttgtcagtcccaccaacataacgaccaatccgaatatcccccgtcatgtgttgagtgattaattcggcagccgtatagatttggtaagccaattcgcgacttggggctgtgatgacgatttgaacttcgtctttttcaggcaccagtttatttaaaaggggtaataagaacgcgtgggttttcccactccccgtttgtgattgaccgataacacttttaccagcgttgatggctggaatcacacgccgttgaaccgccgtgggttttgtaaagtgcatgtcgtctaaagccgcaataatttcgggttttagattaaattgtgtaaattgattatccataaagtcctgctttctattgtttgaatccggtaaatctggatctgcgtctattcagtgtactgcgcggctagcgctgataattctgcaataattatgtcgatttcagcttgatcagctgccttagcgccactagcgagtggatgaccaccgccatcatgttgcttcgctagttcattaatgattgggccctttgagcggaaatgcacacggtaagtgtcatctgcttgttgcacgaagatgacccacgttaatacccctttcaaacgaccgggtgttccaacaatcgagtgtacttgttgcggttcaacatgtaaccggtcctgggttgcgcgatcaaccactaagtaggcgacttgttggtcgttcacttgaagttgatcgaataagtacccttgtaatttggcttgttccaacgtgatttcgttcatcttttgattgagcttatcatggtgaatatcaaacgtcatcatttgggcggcacattccatggtatgtggactggttgaattaaacatgaagcgccccgtatcaccaacaatcccggcatataaaacacgcgcagctgcttgattgaattgtaagtggccttcgctgttattgacgatgtcaataatgatttctgaggtacttgaggcatcaggtaacacccagtttaaatccccataaggatcatcgttgggatgatgatcaattttgattaattcagcgcctaagttaaacgtctcaccactaatccgaggtgagttggctgtatcagtcacaatcactaatgcaccttgataagcagccggttcaatttcttgaacgtttgcgagccatgccaagttaccggtgtcgctcccgacttggtaaatcgtcttgtctgggtagctgttacgcagtacttcagctaagccaacttgtgagccaatcgcatcaggatcaggattgacatgacgatggatgataatcgtatcgtaagtttcaattttagcaataatttgttctggagttgtcatttattaacctctttctaagagttgaccagtgacgagggccttagccacaatcacatgattggcgtaaacatcgacatcgattttagctgaacgccgtccaatttcgagcaagcgtggtaaaatctgaatctgcgtgtcgatttgaatcaaccgtaaataatggaggttgatctgttcaatcattgaatagcgctgatgttgcgtctggagcatttgttgacaagctgccgaaaccgcttcggtcagtacaccaaacgaaattgtccctaagttattcgtcatctggggcgtcacttcatattcatatgccgccgtataaaagtctgggacagtttcactaggacgcagtggttcgacaatctgatcataaaacgtctcggcgacttgcggttggcgttgcgccgtttgcatgttgctcatgacatcttgccgggtaattaacccttctagttctaaattgtccgccaccactggcatcacttctaaactattccaagtcattgaatggccgacactggcaacactcatgtattttttaacgctcgcgggttccttggtcatgactttatccaaggtcatcgtggccggtttatctaaaatatccttcaccgtcacaatcccaacgaggcgcatatgttcgttgacgactggaaaacgcgattgttttaccgccgcactcaattgcttgtagtcggctaccgtttgattagcatgtaacgtgtggatttcagcaagtgggtggtagatatcagccaccgttatgatttcttttttaatcaattgatcggtcaacgcccgattaatcaatgccgccaccgaataggtatcgtaggcagtttgcaaaatcggtaaagccaagtcgttggccaatgcaatgacgtccgccgaagtgccaaaaccgccggtaatcaaaacagcggccccgttttcaagtgctaagcgttgcacatccgtccgatcaccaacaatcatcaatgactttggcgtaatgtagcgcgtgatggcatcgatttgcatcgcgccaatcacaaatttgtccaacaacttgtctaaaccagcgcggccaccaaggacctcgccgtcaatcacttgaacgatttcttcaaaggtcagattttcaatcttcccctttaacttctgttcaatgcggatggtaccgacccgttcaattgtgctgaccaggccgttattttctgccgctttaattgcgcgataagccgttccttcacttaccgagagtgttttggcaattgagcgcaccgaaatcttgtcaccaattggtaaattttcgatgtacattaaaatttgatcatgcttagttgccactcaacgccaccaccctttatcagatttacatagttattaatagtatatcggttttagcgcacaaaaacaaaggaaactcaactattcacgctcccaatcgtataacggtaacgtgatgttttcaaatgtttgcggtgccaagttagtcaccgtaatcccgagcaagcgcacgccatcttctgcatggccgatggtttgccaaatttcccaagcgatcgcctcgagttcagctgccttgccgacatattcgttaaatgttttacgcttagtaatagtttcaaattggcgattccgcacttttaaaacaactgtcaaaccgtgtttttgattcttgcgtaaacgccgttcaagttcaatcgctaacttcttcaactcaacttgcacctgctcttcactgattaggggttgcccgtaagtattctcattgccaattgatttgcgttcacgttggtaggcgaccgggcgattatcgatgccgcgcacgtgccgatataagccgtagccaagcttgccgaaattttgcatcagcatcatttctgattgttcaagcaagtccgcccccgttaaaatcccgagttcttgcattcgcggcgccgttttcttaccgaccccacggaatttttcaattggcaagcgacttaaaaaggcaatcgcttgttccggcaaaacgagtgtccgccccgctggcttgcggtaatccgatgccatctttgctaaaaatttattgtacgaaatccccgccgagctgacgagttgggtttctttaaggatttctttttgaatgtaggcgaccacatcaattgtgtgtgccaagccgagtttattttccgtgacatcaaggtacgcttcatcaaaagcaatcggttcaatcttatcggttaccgtatgaaaaatcgtgtgaatctgttccgagaccgattgataaagcggaaaattgggcgccttaaaaacggcttggtgattcggaatcagttcagctgctttttgcgcactcatcgccgagtgcacaccgtattgtcgggcaacatagttcgcggtcgtcacgacccctttgccaccagtatcactcggattacgggcaatcacgaggggcttttggcgtaagtcgggctgttcacgctcttcaatcgatgcgtaaaacgcgtccatatcaatgtgaatgattttgcgactcgtatcattttctaatggaatcttgaacagctctgccatgttacccctccttaattttttcaacatgctttttcaggcacattgttccgcttttgacgcacttctttctttaacgtgcttttaattcgtaaccttctgtgctttgctacatcagccaaataatcgcccttggcgcttatccgtctgattaggcaaatgctcaaaggctaaccgcgaattaacgcacttcttcctttaacgtgcttttatcaacaacttcttccgctttacctcacttgccaaatcggcgattccgtcgccaattcgtcaagtgctgtaaatgctcagaagttacccgttgatgacgtacttctttcaataagaaaagcctggcatgagcatctcatacacagactttgctgacttgtttaatttaattattttgagtgggatcaaaaatccattcggcccctgttgttgccagtaaatctgttgcttctttaggccccattgaaccgattgagtaacctggtagtggcgtttgatccgcatcccagacttcacgaatcgcatcgacaaattgccatgaagcggctaattcatgccaatgtgtgaagttcgtgccatccccattgagcgcttctaaaatcaaacgttcataagcttctggactgtcagccaacatctgttcatcatattggtaagccaattgatcaggtttcaaggcgaatccttgaccgacttctttaccattaatcgttaatgaaaagccttgttccggttcgacatagattgttaagacatcaggtgccattgctgaacgatctgacttatcatcagcaaaaatattgacgccagtcttcttgaagacgatattgatttgcgtttctttacgtgccaatcgtttaccggtccggacgtaaaatggtacgccacaccaccgttcgttatcaatcatcactttcccagcgacaaatgtttcggtttgtgaatcaggcgcaacgttggtttcttgttgataccccggtttgttttcgccatccaccgatgtttcagcatattgggcgcgcacaaagttttgtttgatttctgctggtgagtaaggttgaatacttctgaaaagacgtgttttttcacgttgtacatcttctgccgtaaagttaaccggcacttccattgcaagcattccgatcacttgcatgatatggttttggaacatatcgcgcaaggcccccgatgtttcgtaatagccagcgcgttcttcaacccctactgattcagccaacgtaatttggacgttatcaatgaattgattattccatacaccactcaatagaccgttcccaaaacgcaaagcaacgatattttgaatcatctctttaccaaggtagtgatcaatccggtagatttggtcttcatcaaaggtttgcgtcaattcttggttaagcgccttagcactttcataatcgcgaccaaatggtttttcgataatcaaccggttaaagccatccgccgttaggagcgcttctgatccgagatgacttgcgattgtcccgaagaaccgtggtgacatggccatgtaataaatccgattttggtgtaattcgtattgttcatccaactgacttgctaaagcctttaatgtttcgtagtgcttggcgtccgtcacatcatgtgattgataatagaaatgacctacgaaagcttctttagttgcttgatcttcatcaaagttgtccaaagctgtcatgacgatttcgtgataatgatcatccgtccatggccgccgtgctgttccaatgacagcgaagtgttcttttaaataacccttccggtataaattaaataatgcggggtataatttccgttgggctaagtccccggaaccaccaaaaataataaagagtgctgctaaatctgtgtgcatatctcacaccactttcatataaattaattttgtggcgtcacaaagatgtgttgtgccgctttgaggccgatttggatttctgtttgactcgtattattaaaaacagtcaacggactttcgaagaggccaaccttttggagcgtcacactgtcaccgactgacaagccgatttccagtgtatattttaataagtcattatcatccaatacgcgatcgataatcgccgtttcacccacttgtaatgtttcaagtgcgatgtgactttgttgttcgaattcccccttggcattgggtataatcccaccatgcgggcaacgcgttggatgccccaagaaatcagctaaccgttcagccaagtcgtgattagtaacatgttcgagttgttctgcttctgggtgcaccgtattgaattgataatgtaacttgtcgactaaaaaaacttcccataaccgatgattgcgcactaatagggctgcttcgcgggcgccttcacttgttagttgaattccttggtaaggtgtgtggttgacgtagttttccttcactaacttattgaccatttccgtgactgatgccgccgaaacgttcaatcccgctagtatttccttattggtaactttctttgcgtcgccaccaagttcaaaaataatttttaaatagtcttctttattgggtgtcattgccatccagatccttaatcaagtttgtcgacaaacttttcttagttatccctgaactaaatgaatgtctactttctattatgccttatttgtaataattttcataccattaagcttcaatttaatcccttaaatagtaaaaaattaatctcttttcagcaacaaaaaaaggcggtagaccgatttgtttcagtctaccgccttaaatttgtggtcgggcttctcaaaccacttattctagcaaatcacttggtcaatttgctagaattctgcttcgagaatccctttcaattctttaattaatggttcttttggattggttaccgtacagttatcttcatatgccagttctgctaaatcatcaacgtggcgatcaaagtcggcctttgtcacgccattatcacgtaaacgcatcttgatgccgatactttccgccaatgcagtcacagcatctgcgtaagcggccaccagttcttcagtcgttttacctggtaaaccgagataacgtgcaatttcagcataatcttcatctgctctgaagtaactgtatttagcccagagtgcccgtttcgttggtgtcttagcattatagcgaatgacatgcggcattgtaatggcaatcatcaatccgtgcggcaaattgaacgcgccgcccagtttgtgcgccagtgaatggttgatacctaatagcgcattggcaaacgccattcccgccattgttgacgcatcatgcatattggctttagctgtcttatcgcccgcataactcgcttgtaagttatcaaacactaatttaatggcttgcaaactgagcccttttgtataatttgacgccatcgctgatacgtaactttcagtcgcgtggcataaaacgtccatcccagtatgcgcaaccacgcggggtggcacactttcgatgaattgactatccacaattgccacatctggtgttaacgcataatctgccaatggatatttgatgtgcgtttcactatcagtaatgaccgcaaacggcgttacttcagaacccgttccagaagtggttgggatacagattagtttcgtccgatcgaggtttgggaacttgtaagtccgtttccgaatatctaagaatttttgcttagcgccaaagaagtcggcatcttctgaatcatagaataaccacatccctttggccgcatccatgactgagcccccaccaatagcaacaattgtatcgggtttgaagcgtttcatcacttcggcgcctttataaatggtatcggttgatggatctggctcgacatcggcaaatacttggacctgcacttgatctgtgcggcgcgccaagacgtcttcaacaatttgcacgtaacctaagtcgaccatcccttgatcagcgacgataaaaaccttatgcaagtccgccattttttctaaatagttgactgaatttttttcaaaatagattttgctgggcaacttcacccattgcatgttattccggcgcttggttagcgtcttcacgttcaacaaatcgatcgttgaaacgttgtgggagattgagttatggccgtatgacccacagcctaaggttaatgatggtaacatgtcattgtataaatcaccaatcccaccttgtgctgatggtgtattcactaagacccggcatgctttcatccgttttgcaaattcgagtggtaaagcttcatccgttgtatgcaacgaagccgtatgcccaagaccaccaagatctagcattgcttcacagagttgcaagccatcttcgcgatctttagctttaatcatcgcaagtacgggtgataatttttcatgtgagagtggatattggtgtccaacacctttaatttcagcaattaaaactggcgtatcttctggaatatcgatcccagctagtttggcaattttagcagcagattggcctggaattgaaggtcggaccgcattcttatctgggtcgattactgcgtcattgagtgctgataattcgcttggtttagcgaagtaaaccccttgtgcttggaattccttcttcactgccgtataaatttcagcatcaacaattacggcttgttcagaagcacaaatcatcccgttatcaaatgatttcgagaggattaaatcattgacggcttgtttgatgttcgccgaagcttcgatatacgctggcgcattcccagccccaacccccagtgcgggtttaccagttgaataagcggctttcaccatcccaggaccaccagttgctaaaacagttgcgaccccttcatggttcattaaagcctgggtagctgcaatacttggttcttcgatatataagagtgcatctgctggcataccggctttaactgctgcagctttaatgacattcaatgcttcagccgaacaacgttgcgcactaggatggaaagcaaagatgattggattccgcgttttaatcgcgatctcagctttaaaaatcgtcgtcgaggttggattcgtgactggtgttacaccagcaatgacaccaacgggttctgcaatcttagtgatgccatgttctggatcttcttcaatcacaccaactgttttattgtctttaatcgcattccaaatttcctcggttgcaaaaatattcttgatggctttatcttcataaatcccacggccagtttcttcaaccgccatcttagcgagtgccatatgttggtctaacccagcaatcgccatttgatggacaatattatcaatcttggcttgatcgaatgtttccaaaattgctaatgcccgttgtgcacgcgtcactaaatcggtgaccatttcattcactgtgttttcaaccgtttcaactgctgctttcttaaccatatcgattccctccatgccaattaactattgtgatttatttaacaaagttagtttagcgcattttgagttgtttgtaaactgttttgtgattataattacaaattttatttcttagttaaaggcgatttatcttttaaaagcctacatttgataataaatttactatataatgcaaataaaaaagcgctcggttgaagtattcaatcgagcgctctctgaattattttgtatcttcttttgtttcttcaaccgtttcttcttcaaccactgttgcggcttctgaagcagttggtgttactgtccggattgcgctcaagttaaacttgaggtaaacgccgtcacaatctaagacaacgattttagtatctgtattaacagaatcaatcacaccgtgtaaaccaccgattgtgatgactgcgtcgccttttttcatttggttcaccatttcttggtgtttttgttgttgtttcttttgtgggcgcattaccatgaaatacatcattgccatcattaaaattaagataacgaagaaactgggattaaaaccgccggcacctaacacaaagtttgccatttaaaaaacctcttttcaattttgtctattactaactctatcagacttatcaagcaacttccagtgattcactagaaattccgagtgttcttttcattgtaaccatattcttcgaagaacgcttctctgaattccaataaattatcttgttcgatggcatcttgcacttgatgcatcaaattaatcaagaagtataagttatggtaactcgtcaaatgaatcccaaacgtttcgtccgctttaatcaagtgccgaatgtaagcgcgggtgtagttcttgcagacataacaatcacacttaggatccaatgggcggaagtcttctgagtacttcgcattcttaaccactaatcggccttgtgaggtcatcgttgtcccattacgggcaatccgggttggcaacacgcaatcgaacatatcgacaccgcgaatcacaccatcgattaaggcatcaggcgaaccgacgcccatcaagtaccgtggtttgtcttcaggtaacattggtgttgtgaaatcaagcacgcgattcatttcgccttttgattcaccaactgataagccaccgattgaataaccggggaagtccatcccaactaaatcgcgcgcactttggcggcgtaagtcttcaaagccggccccttggacaatcccaaatagaccttgcgttgctgggttttgatgcgcaatcaagccccgttcagcccaacgtgatgtccgttcaactgattttttaacgtagtcataactttcaaagaatggtggacattcatcgaaactcatcatgatatcggcacccaaagcattttcgacttggattgctttttccggtgataagaacagtttttcgccgctcaaatgactcttgaaagcaaccccttcttcactgatatcccgtaatctcgcaagtgagaacacttggaaaccaccagaatcggttaacacaccgcgatcccagttcatgaacttatgaagaccaccggctttttcaacgatgtcttccccaggtcgtaaccagagatgataggtgttcgataaaataatgccggcacccatttcttttaattcttcaggcgccattgtcttaacactggcttgggtcccaactggcataaacatgggtgttttaaacgtgccatgtggtgtcacaatttcaccaaggcgcgccctggtatgtttttctttcttgattaaacgatacttgatcgctggttccatttaatcgactccaattctaggattattgttggttcagtaataattggtacgcatagcgtttcggtgacggaccgtttgcaatgaagatgtcaccacgatattgaaagcctactttttgaatcatatgttgcatcgccaagttatcagggtgcgtatcgatgcgtaaatcatgtgcgcctcgtaaactggcagcggtcaccaataaggttaaaaactgtgtcccgagatgttggccgtggaaggcactatcgagtgcgacacggtgaattgaaaaataaggtgtcgaaccagattgccattgaccattggtaattgctgcatagccaggatcttcagttgctagaattgaggcgaccccaatcacctgttggtcagccatcagaatgtaacataattcttggcgaatctcgtcttcaaactgagtttgattaggttcacctgcttgccattgatttatttggcgatcctttaaggcggcctttgcatgttcgataatctctaaaatccgcggtaaatctgtaaacgttgcttttctcaaatacatcaatgctgccacctcatttttgtcgaattatttaacaaacatggcatcgccgaagctaaagaaacgataccgttcatcaacagcgtgttgataagcatttaagatgttttcgcgaccggtaaatgaagcgaccaacatcactaaggttgattttggtaaatggaagttcgtgatgaatgcatcaacagctttccattgataaccaggtttgataaagattgatgtccagccactatcagctttgagttcaccatcaaacttcgtcgcaattgtttctagcgtccgaatgctggttgtccccgttgccacgatgcggccaccgttttgtttaacttcattcaacgttgcagcagcttcttctgttaaacggtaaaattcgctgtgcattttgtgatcttccacgttgtcttctgaaacaggccggaaagttcccaacccaacatgcaacgttaagtacacgagtttgatgcctttatcttgcaccttttgcaagagttcttctgtccagtggaagccagcagttggtgcggcagctgaacctggttctttagcataaacggtttgatacatttctggatcgtctaatttttcttttatgtatggtggtagaggcatttcgcctaaggcttctagaatttgcatgaagatgccatcatacttaaattcgatcatgcggccaccgtgttcgagttccttggtcacaactgcttttaattgaccatcaccaaaaacgacttcggtgccgactttggcccggcgtgctggcttcatcaaaacttcccattcatcgtcatgcgtgttgtttaaaagcaagacttcttcgtggccacccgtatccggtttgacaccgtataaacgtgctggcaagacccgcgtattgttcatgacaactgcatcgccgggatttaattcatcgataatgtcgtagaaaactttatcttctagtgcgcctgttttgtgatccatcaccaataaacgagacgctgcccgttcaatcatcggtgtttgagcaattaattcttctggtaaattataatcaaaatcttctgttgaaaccattgtgtaacctctttctaattttctgaatagggaatgccgagatgttcataaccagcgggcgtcacaacacgtccccgcggtgtccgttttaagaacccaatctgtaacaaatacggttcgtaaacggcttcgattgtttcattttcttcaccaatattagccgcaatcgtctttagaccgactggaccgccatgataatagtcaatcatcatctggagaatcttgcggtcaatactatctaagccacgtacatcgacttgtagttgactaagcgcatggtcggcaatcgcttgatcaattgccgcttggtccgccacttgagcgtaatcgcgaatccgttttaataagcggttcgcaatccgcggcgtcccccgcgaacgacgggcaatctcatgcgcgccttcttggacaatggccatgttaaagacatctgccgagcgttcaacgatatcgaccaaatcatcttcatcatagtatgccatatgttcgacgattccgaaacgatcacgtaacggtgccgacaataaaccggcccgagtcgttgcgccaatcaaggtaaacggtggcaatggaaaatgcaccgggtgcgcagttggcccttgtccgaccacgatatcgatgtaaaaatcttccatcgccgaataaagtagttcttcgaccactttcggcaagcgatgaatttcatcgataaatagtacatcaccaggttgtaactcgttcaacaatgcgactaaatcgccaggccgttcaattgctggcccactcgtcgtccgaatctgaacatgcagttcattggcaatcaccatcgccaaggtcgtcttacctaaaccaggcgggccatataatagcacatggtccaacgactcttcccgctttttagcggcttcaatataaaccgccaactcatttttgacccggtcttgaccgatatattgcgcgaggacttgtggccgtaacgtcttttcaatacttgtttctgcgaaatcttcgttttctgcggaaacaattcgttcttctgccatccattagtcctcctttatttcttcattaataagcgtaaaccttcacgtaagtactgatccgtagtttgtgcattgaaatcagccagtgttttggtaatcgctttgacttcgcgggctgaatacccaagcgcggttaacgccgctaacgcatcgtttaattctggtgattcaccaggcgtaccaagatcgatagccgtttgaccagcgagcgtttcggtttgttccaaatcaccgagcttgccctttaaatctaagacaatttgttgggcagtcttcttgccaaccccagggaacttggtcaaatagctcacatcatcattcataatcgcttggattaacccagaatgatcgctattggctaagatggccaaggcactcttaggaccaattccagaaacactgattaatttttggaaaatttgcttttcatctagatcgtaaaaaccaaataacgtgatatccgtatcacgaaccgcttgatagacataaatctgaacgatatcggtcgttgattcggtgtaacgatacggattagcaacttgcaattgatagccgacgccttgaacttctaagacgacatagtacggactaaccgccgtcaccaaaccttttaaatattcatacataaatttacctactttacgagaacgtatatttgcttgttaaattgtaacataaaatccgaatcgtgaaacagccagcagccaaaaagcgtaaaagaagggcctaagtgtgacccacggccaactcaaaccctagcaattagtattcacgaatcttcggcggttggtaatccttgataaaggatgccatcacactgaacgaatcggtaaataagtatttttcaaaatcgacctgtgttaaaaaaccttcactgaccatgtgggctaaaaattgttgtaacaaatcataatagcctgcgacattataaaaaatgcagggaccattttgttgcccaattcgcgcccatgaaataacttcactcatttcttccagcgtaccgggaccacccggcaatgcgataaacacatctgccagttcaatcatcttggctttacgcgctgacatcgtatcaaccttaatcatttcggttaaacctggatggacgagttcttgctgactcataaaccctggcatgacgccggtcacttgtccatcatgggctaacaccgtgtcggccacggtgcccattaaaccaacttgggcgccgccataaatcaagcgcgcattgcgcccagcaatccaagtgcctaacgccttagccgcttccgtgtagattattttattaccactactagcgccgcaataaacggcaatgttttgcgttgccattagtcagcctccttagcggttaacaaccgagccaccgtactgatgggcaagccaacaacattgtaaaagtcaccgttgattttctcaacgagcagacttccctgtccctgaataccataagcaccagccttatcccggtactcttcggtgtctaaatacgtttcaatcatttcatgacttaacggccagaacgtgacatcagtttggacaaccgttttgcggatttcaccatcaatggataaccaaacacctgtataagcttgatgcgtgctgccactcaattgccgtaacatttcggctgcatcttgacgatcatgtggcttaccgtaaatcgtgccctgaaaactgacaacagtatcagcactgagcacagtggcctgaggattcttttgggcgatggattcacccttaagttgcgccaacatctgcacgtagtcagctggtgccgtcactggtacctggcgttcatcgattgttgcgggttggacttcgaaatcaggcacgactttttgtaaaagttcgcggcgtcttggtgattgtgatgctaagataaacattattcgccctcccaactatggtgtggatcttgaatccgtttaaacattttttctaaatctttttgcgtgtaatggattaaaaccggtcggccatgtggacagttaaacggattttccgtctgtgccagatcaaccaacaatgctttagcttgcgcatcatctaagtgatggtgtgccttgattgactgtttacagctgatcataatcgccgttttttcacggaaatgggcaatgtctaacttcccgttttccaatacagtgtcaatcatctcgcgaatcgttgcttcttcttggccttgcgcaatccacgtcggatgactatggataacaaaactattttggccgaagctctctagctgcacacccactgcggcaaggagttccttttgtgcttgaatcttaatcgcatcactattgggatattccaacacaaggggcaccaataaattctgggcgtcgttgctaacttcaccaattttttcgcgatagtattcatacttaatccgttcttgagcagcatgttgatctaagatgtaaaagccatcttcaccttctgctaataagaatgtattgtgcagttgtccaatatagcgtaacgctgggaaacgctcaatgggtgctgcatcatcttcaggttgttcaccaaacggatttccgatcgcctctgcttcgtacttatcatcccaccgggccaattgttggggttgttcaaatatcggcaggctatttaaattaggattagcagttggttctcgtttaaggggtgtttcggtttccgcaatttgcgctgccgcttgcatttcagttttaaccggcttttcaggaactgtttggggctgaattggccgcaccgtaccagtcgcattgcgccgttgactcgtaatttggtttaaatccatttgaagctggtccacatcgaccggtttcgtttgttttagattctgcactgcaccgggaattaaattctcggtgctgagtcgctcacgaattgctttttcaatcaacgccatcaaagcaggttccttactcaagcggacttcttgcttggtcggatggacattgacatcgattaacagtggatccatttgaatatttaaaacgacgactggataacggccgaccattaattttgaaccgtaacccttgataatcgccttattcaattgataattcttgatataacgaccattaatcaacactgaaatgtaattacgactggcccgcgttagtttcggtagcgatacatagccggttaatttaaaatcgagatcttctgcactgactggcaagagttgcttagccattgtaacgccatagatcccggcaatcgtctgttgtaaatcgttattacccgccgtttttaacagcaggtgatcatcattggttaacgtgaacgcaatctgaggatgactcatcgccaagcgattgacgatatcgatcacgtttgccaattcagtctggaacgtcttcacatatttcaagcgggctggcgtgttgaagaataaatcacgaaccgtgattgccgtcccagggcgaattggattagttttctgttcttctaagacgccacctttaaaatgagcaaatgtccctaacgaatcagcggttgccgtttcaatcgtcaaatcggacactgacgcgatactggctaacgcttcaccccgaaagccaagtgactgaattttgaaaagatcctggcgcgtggcaatcttacttgtcgcgtgtcgcttaaatgcagtgggtacatcttccggttcaatcccatcgccgttatcgatgacttgaatcaattgcaaaccagcctgttcaatcacgatgtcaatttgagtactattggcgtcaatcgcattttctgccaactctttgacaactgaagctggccgctcaattacttcgcccgccgcaatttggttacttaatatttctgacagttcatgaattttccccattagcgttctcctttttctgacgtgtgggtatttagtgctaaaacgtgcttttcaagctaactttctgcgcttagcgctgtgaatcaaatcatcgactgcgtcgctaattcgcttccctgtgctaatgctcaaaagttggacaagcttgaatacactcttatccgaaacgtgctttcatcaacaacttcttccgctttaccccacttgccaaatcggcgattacatcgccaattcgtcaagtgctgtaaatgctcagaagttacccgttgatgacgcactcttatttgtttaattccttttgccatttgtatagcatgtttagcgcgtctagtggtgtggcgctcattaagtcgaattgtttaaccgccgctaggactttagctgcttttggatccgcttgtggtgccacttctggttcgaatagtgaaatttgttcatccacttcttcaaccggttcagcagccggcgcgacagctgcctttggtttatcttctaattgatccaagatgacatctgcgcggttcaacaacggtgtcggcatccccgctaatttagccacgtgaatcccgtatgacttatcagctgggccagccagcatcttgtgtaaaaagactaactcgccattttcttcaactgccccgacgtggacgtttttcaatgcggttagtgaatccgctaagctggtcaattcgtgataatgcgttgaaaagagtatcttggcatgcacgttgtcgtgaatgtattcaataatcgcttgggccaaggccattccatcataggtggctgttccgcgtccgatttcgtcaaagagaatcaagctattttgtgtcgcgttcataatcgcgcgattggcttccatcatttcgaccatgaaggtactttgaccggaaattaaatcatcggccgcaccaatgcgcgtaaagatctgatcaaaaatcggtaagttcgcagatttagccggtacaaaacatcccatctgcgccatgatgaccgtcaaagccagttgccgcatgtacgtactcttcccagacatattcggaccagtaattaagagcatatccgtatcggtgcccatttgaaccgcgttgggaatgtatttttggcgaccgagcactttttcaaccactggatgacgcccatccactaaatcaatttcgcgactatcagtcattaatgtcggctgaacgtagtggtagttttcactgactacggcaaaactttgtaagacatcaagggccgccacacttttagcgagggtttgaagccgttcaatctccaacttaacggtttcgcgaacttgcgtgaataactcatattcaagcgcggttgagcgttcttcggcttctaaaatcaattgttctttcgcctttaattccggtgtaatgaaccgttcggcgttggttaaggtttgtttccgttcataacgcccttcaggtagcgcgtctaaattcgcacgtgtcacttcgatatagtaaccaaacacgcgattaaagccaatttttaaattatgaatcccggtaatttcgcgttctttagcttcaagttgtgctagccattgtttcccgttagacatcgcatcgcgataatcatctaatgtttcgttgtaacccgattgaataatcccaccgtcagtcactgaaattggcgcatcgggattgatggccgtttcaatgagctcgcgtacatcatcaaccggatcgagttggtctaacgcacggtcaaaggtctgatcgtcattaatgcccgttaaaatcgttttaatcgttggaatttgttccaaggaagtcttcaactgaattaaatcgcggccattaacactgccaaatgcgacccgacctgctagccgttctaggtcatacacttttgtgagggcgtcttgcaagtttgtccgttcaaaataatggttcatgaaactagcgacttggcgttgccggttttgaatcgcctttaaatccaataatggccgttctaaccattgttttaataaccggccacccattgccgtcttggtttcatccaataaccacaataatgtcccgctcttatgaccagtgcgtaaagaagccgttaattcaaggttcatcttcgcagaatggtctaattttaaatattgggatggctcgtactcttgggcccgttgtaaatgccctaaatggcgcttttgcgtcgttgccaaatacaagaccaattgtttaatcacggccagttcaaggggctgggagatgttttgtgaaacgaaactgacttcggccgttgcatcgccatcttcttgatacgacacgagaatttgttgttgaacaaacgcgtgcacaacctcactggtaacaccgtggttaatgacaacttctttggtttgtaaactcaacatttcgttgagcaataaatccaaactcgcaatctggctgactttcatctcaccagttgataaatcggtataagcaaagccaaactgatcgccatctgccaccactgctgttaagtaattattttgtttggcatggccggctttttcatccatcatcgttcctggtgtgaccagttgaatgacttcccgattgaccatccctttagcggttttaggatcttccatttgttcacaaatagcaaccttgtaaccttgatcgactagaatatcgatgtaattttgggctgcgtggtgtggtaccccacacattggaattggatcatccgcatttttattgcgtgctgttagtgtgagttccaataattgtgaagctttgacagcatcatcattaaagagttcgtaaaaatcaccgaggcgataaaataaaaaagcgtccggatactgatccttgaccttttgatattgcgccatcattggcgtttctttcgttttttgtggcatgttgttaatccctctctcattgacgttgatctgctgctaaggtgcttaaaattgcgtataggggtgatctggtgaaatctggatcggtttaattgatttagcgtgacccgttttgtcatcaatttcaattaaacagccattcaattgacccggtccttcggtcactaattcaaaccgttctggccgttgtgttttaaaccgattaatgatcttttcgcgcttcacgcctagaatcccgttataagggccagtcatcccagcatccgttaaaacggctgtgccttcaggtaagacgcgcgcatcgtttgtttgcacatgtgtatgggtcccaactaacgctgaaatccggccatcaagataccaagcaagtgcgagtttttcactcgtcgtttcggcatgaaaatcaacgaagatacagttggtttctttactaatttcagccaccatttcatctaacatttcaaacggatcaattagtagttcattcatcaaggcgcgcccttgtaagttaatcacggctaatttggcttgattgacgttaatcattgtcatcccttgcccaggcgttcctttcggaaaattggccggccgcactaattttttagcatcgtcgatgaattctaaaatatcgcgcttattccaagtatgattgcccatcgtaatcgcatcggccccagcttgtaaaagattcttataatccttttgagtcatccccttaccatccgcgatgttttcgccgttgataatggtcacctgtggtttgtattgttgctttaatgctggtaggtaatcattgatcattttttgacccattgtgcccactgtatcaccaataaataaaattcgcatgttgcgccccttaatgttctttctcagactttgatatagcttctattgtagcaatttttgcccagaataaaaagttttgctgtacccgtagaaaaacaaaaaaagccccgcgcaccgaaaaggtgagcggggctgataatgtgcttttcaaaccatgttcctgcgtttagcctaattagccaaccaatcgacttcgtcgcttattcgtctaattttgctaattctcagaacataatcggtttgaacacacttcttcttttaacgtgctttttgaaactgactcttgcgcttagctacaatccgcaaacgatcaactccgtcgctcattcacagatttaggctaatgctcaaagtcaaaccgtttcaaacacacttctcttctaacgtgcttttagttgcaccaacttccgcttaatctaaaattggcagtcatcccacaactcgggataactgccaattttgtattaatgctcggttgctaaacgcacttctttctttaacgcgctcctcgatcagtcttttccggttaactgcaaaatgagcatcatggcaagaaccgccacaatgcccattttactgttaatcctcaaagcctactcagatcgagtcgcacttctagtgttttaagtgataactatatgttgaaataataatgttttcgcggtttgcaaatgccgttcttagtcttagacttgattggttatgcaaaatgttttgccatggttttcttggtacgaattgtgggaccaagaccgtggttgtaaagttccgtttttgcgcattcttgctaacaatgtcaacaaagcgaacaattggtttttgaattgaccggtatgatgaatggacatcgacgaaccggacattcggaaaatcttccttgaattcagcttgaatttcacgttccttggctggattttcatccgttgagacatgcatcgcaatcacataatccccgattgattgtgcgtaatctagcgcaccacgggttacttgggtcacgttgctgaccaagacaatcacagttgaaccgtcataatcatgcaagacggcttctttagcactcacgcgtagttgaagcgccactttcttgtaatgatcatgaatcttatagaaaatccaaatcataacaggcatgatgatgaagaatggccagatatcaggtaagcgataaacgaagagaatgactaagatggcaaacgaaatcaaagcgccaacaaaattggcaattgatttaccaaaccaattctttggtcgttcgacccaccacttgcgcaacatcccagattgagaaagcgtaaatggaatgaacacaccaaccgcataaagtggaatcaagcgtgatgtatccccgttaaagatgaaaatcaatgccattgaaccaatcgccaatgtaataatcccgtttgaataacctaaacgatcgccacgatccatgtacatgtgtggcatatatttgtctttggctaaattatacgctaacactggaaaagcggagaatccagtattcgcagcgacggctaaaataaaggccgttgcaaattgcacaatatagaataaaaagcctttcccaaaggtgtgttgggccacttgtgatagaacagttactttttctgctggtacaatgccgtaccagtagtttaaaaatgtaatcccagcaaagaagaaacctaagatggctgccatgattgctaatgtttcagccgcgtttgttgcacgtggcttcttgaaaaatggtaccgcattactgatggcttcaaccccagttaatgatgatgaacctgatgagaaggctctaaaaatcaacgccatcgaaacacctggtacaacagccccaacggttgatgttgcgtggaacggaatcgcacctgtgaagatcttataacacccaacgatgatcattaaagtcatcatcaagacgaataagtaaacgggcaccattaaaaatgatgctgattcacgcatcccacgtagattcattcccatcaagatcaaaacgataatgaaggaaatccctacttgatgcccatacaatgccggaatggccgaggtgatcgcttccgcacccgcggaaatactaaccgcaacggttaacatgtaatccacaagcagtgaaccacctgccactaaaccagcatttttccccaaattttcactggaaacaacgtaggcgccaccaccacctggataggcgtggatcacttggcgatatgacaaagttaatgacaatagcaatacgagcacaaaggctgcgattggaattgaataccaaattgccgcggccgaaagggtcgtcaatacgatgacgatttcttctgtcccgtaggccactgatgacaatgcatcagaagatagcatcgctaacgctttaaagcgtcctaatttttgattaccctcatcggaagattttaacggtttcccgataaaaatccgttttaactgttgcatagcaatatgacccctttaaataatatttctaacataaaaagccctcatgtgaatatcattcgtcgcaatccacacagtgacttttgaatttctctataacttaaaaaaataattgccgtttattcaaacaaatcgtattctactatagttacgcatgaattactaccacaatttaaaaaagaactgaccaaggtaatcgaaacgcctcgattccttggtcagttcttattttttatgataaacgacgggcaaaatctggtttgtaatctgaaattttagtaattcgaactttatcgccaggttgtggtgcttggataaagtagccatccccaatgtagattgcgacatggtgggctgttccaacccctccccagaataataggtcgtttggttgtaattcattgagcggtacatctttgcctaacttactttgatcttgtgaaacacggggtaatttaatcccatttttagcgtaaacgtattgcactaagccagaacagtcaaatccttcgggtgtggtgccaccccaaacatagggtcgcctaaatatttaaccgcttcttggataatcttattattcattaaatccttgttaccagtaattaatgcggcacctgcatcactcgccgctttttgagcagccgcttgcgcctctaattctttcttgaacttcgtttgtagttgcgttaattggtcgttagcttgttgtttttgttgatctaagtccttaattgcggcatcattttcctgtgataatgataccagcttggcctgttgcgcttctaattcagtcttttgttcagctttttttcagctaatgaggccgtttcagcggcattatccgccttagcgtctaacagtcgattgatgattgaacctttttggaataaatcgctcaaactttggctcgacaataaactatcgatcatatcaagattaaaactgctatctcgtgtttgtaattgccgcaggttaccttcaatagtcgccacttgcttttgataatcagcagatgttttgctgaactcgtcttgtttttctttaatatccgcctgttttgcagtcatttgttcgttcaattgcgttgtttttaacgttaaattactaatattattattcaattcggatagatgatcttgtgctgtcttaatggcagtttgcgtttcttcaggcgttgcttggaccatttgtggtcgcgctaaaaagaagccacctaacattaaacaggttatcagtatccgccggtttcgaaaaatcattgtcaacacctccaactattattataccgcaatcaaattaattaatagggttgcgcacaatttatatatgcgcattttttttgaaaaataaaaaagttccaaaacttttgccagttttggaactttggatttaatcgtgctttttggttataacgccttccgcttaactacaaaacgagcgttatggcaaaaaccgccataacgctcgtttttaggttaatgctcagaaccaacccgtttcaaacgcacttctttacatcataccgcccattgctgatgggtccatgcctgctgctggtgctgggttgtcttctggtttgtcagcaaccactgcttcagttgttaacattaaggccgccacactagctgcattttgtaatgctgaacgtgtcaccttagttggatctaagatgccggcttcaatcatattttcccagttgccgttggctgcattgtagccgacttcaactggttgtgatttaactttttcaacaattactgagccttcaagaccagcgttggttgcgatttgacgaacaggttcttccaatgcacgaagcacaatgttaatcccggtttgaacgtcgccttcttctttaagcgcagcaacactttcgatcacatcgattaatgctgtcccaccgccggcaacgtagccttcttcaacagctgcacgcgttgcgttcaaagcatcttcaatccgatatttttgttctttcaattctgtttctgtggcagcaccgactttaatcactgcaacgccaccagctaatttagccaagcgttcttgtaatttttcacggtcaaagtctgatgttgtttcagcaatttgtttcttgatgttttcaacccgttcagcgatggcatctttgctaccagcaccttcaacgattgttgtatcatcttttgtaacagttaccttaccagctgtccctaattgatcgatagttgtttctttcaattctagaccgaggtcacttgtaatcactgtggcacctgttaatgtggcgatatcttctaattgttccttacgacgatcaccaaaaccaggggcttttacagcaaccacgttgaatgtcccacgaatcttgttcaagacaagtgttggtaatgcttcgccatcaacatcatcagcgatgattaacaaggctttaccttcttgcacgattgattgtaaaagtggtaaaacatcttgaatatttgaaatctttttatctgtaattaagatatacgggttatctaggtcagcttccatcttatcgttatccgttaccatgtattgtgacaagtaaccacggtcgaattgcatcccttcaacaacgcttaattcagtatcaatcccttttgattcttcaactgtgatgaccccatcgttgccaactttttccattgcatcagcaattaaacgaccagtttcttcgttagctgatgaaacagcagccacttgggcaatggcatctttactttcgactttgtgtgaaatttcgtgtaacttcttaacagcttctttagttgctaattcaatcccacgacgaatcccaactgggttagcgccggctgtgacgttcttcatcccttcacgaataattgcttgagctaaaacagtagcagtagttgtcccatcaccagcgatgtcattcgtttttgaagccacttcagaaactaacttagcacccatattttcaaaatgatcttctaattcgattgctttagcaattgtcacaccatcattagtaatttctggtgaaccgtaagctttttccaaaacaacgttccggccttttggtcctaatgttgttttcactgtgttggctaattggtcaacccctgccaacatttttgaacgtgcgtcttctgaaaatttaagttcttttgccataatttattcacctcaaaaaatttttttgtttattattattcaacaatagccataatatctttagcatggagcactaaatattgttgaccttcatattcaacttctgaacctgcatatttatcgtaaataacttcatcgttttctttaatatcaagtggaattcgtttgccgtcacttgttaatgtgccggtaccaactgcgactactttgccggtttgtggtttttgtttagcattacttgccaaaacaatcccacctactgtttgttcttcttcgtctttaacggcgataatcacgcgatcttctaatggttttaacacttaaaatccctccatcaattttacttttttagcactctatcatctcaagtgctaatcacaatttttatcatagcattttttcagaacattgcaagtattatgctagcacttttgcaatttgaatgctaatacgctaagctattgtcacaacaacctttgaggagctttcacatgacgctatacaaacaaaatttttcaattatcattagctatttgttcattttattgattcctagtgcagtcgtccgttttggtcatctatctgcctcgttttttctaatcacaaccattgttgattgcctcggtgccgcctggttactctatcttaatcaacgcacacaagccaatgccattgagcagcggcctttcccactcaaacccattatcatttgggggttgtgtggcattgtactggtcttagtaattcagattctcgccggcttcattgaacaaaacattctccacatcactgccaaatcgctcaacaccatttcactgatgaccatgatgcaacaacaaccgtttcttattttagcaacgaccatcgccgcaccgattatggaagaaatcacgtttcgcaaagcaatctttggtggattagccagtcgcttaaaccgcattttagccgccatcatttcaagtttactgtttgcttttttacatcaggacgggcatttgttaatctacacggccatcggtcttttcctatgttggctgtaccgcaagacaggttcgattttcaccacaatcatcagccatgctgggatgaacctgatcgtcactttactgtatctcaatcgttaaaaaaagcgttcaaacaggcggctactacgagcaacttgtttaaacgctatttttattcttgattttgttcatcagtataattatcgaggaagtaaatcaaagtttgtagttctttagccaaatcaacattttgaatccgcacgtttgatggcacagaaattcgaattggcgtaaagttcataatccctttaatcccagcggccactaattcatcggtgacttcttgagcttcatcaattggcactgttaaaatgacaatctcgatctgttggttcttcaattgttcggccatctcgtccattgaatagacaggaacaccggtttgaattgttccaatcatttcgggtttaacatcaaatgctgcgctaatccgaatattattggtttgcttaaagttgtagttcaataaggcgtggcctaaattccccaccccaatcaatgcaacgtttgtcaatcgatcttggttcaaggtcttcttgaaaaaatctagcaacgaagcgacatcatagccataaccacgtttgcccagtgcaccgaaatatgaaaaatcacgacgaattgtcgcactatctactttaactgcttcagataatccagtagaggaaattttagttttccctgaattgttcaaaaagtttaaatagcggtaatataaaggcaatcgttttgcagttgctcttgggatattattctcaaccatttgaaacctcctttttgatttgcttgtgaaaatagtgtagtaccatactgaaatcatactgaattttcttgtgaaaagcaatatatttacaattttgactgtccatcgtttaaatctgttatgatagttgacagtagtattataaaaatgaacgcaattaactttaaaaaacaccgcacgaaaggatttttagccgtgatattattacaagttcaacaagtcgcacgcagttttggcggcgattaccttttcaaaaacgcacaactcgaagtacaagaccgcgcccgtgttgccctcgttggtccaaacggggctggtaaatcaaccttattaaaaatgattgccggcatcacaacgcctgatgaaggccaaatcattcttagcaaaaatgctcaagtcggttacttagcgcaagatagtggcttagactcaacccggacaatctatgcggagatgttaaccattttcgatgatctccgccaaatggaagcccaaatgcatgaactcgagaccgcaattgcggacacaaccattgaccatgctagcgaagaatatgcagccttactaaaacgatatgaccaagtccaacacgatttctctgaagctaatggttacggctatgaagccgaaatccgtggcgtcttacatggtttccaatttccagaagacacctttgaaaagccaatcagtacactatcgggaggcgaacgctcgcgactcgcacttgctaagttattgcttgagaaaaaagacgtccttattttggacgaaccaacgaaccatttagatatcgaaacactaacatggttggaaaattatttacaaacttatcccggtgccttgctcaccgtctcacatgaccggtacttcttagataaaatcactaaagaagtctacgacatgagtcgccacacattgacccattataccggtaattacagccatttcttaagtttaaaagaagctaacctctcactcgaatggaaggcttatgaaaaacaacaagctgaaatcgataaacttcagacctttgttgataaaaacttagtgcgcgcaagtaccacgaaacaagcccaaagtcgccgccgtcaactcgaaaagatggataaattagaccggccgcaaaacgaagccggtaaaattcattttcatttcgaaagcgaacatccaagcggtaacgaagtattgcaagtaagcgatgccgctgtcggctattcccccgataaaatcatggtacaaccaatcaattttgaagtgaaccgccacgaacgcttagccatcatcggacctaacggaattggtaaatcgacccttctcaaaagtatcttgcaccaaattccgttcatcaaaggccatgaaaaagtcggtagtaacgtttcaatgggctactacgatcaagagcaacgcaatttacacactaacaaaaccgtcctcaacgaattatgggatgaacaccatacaacacctgaaaaggaaattcgcacactacttggtagtttcttattcaccggtgacgatgttttaaaggttgtgtcacaactcagtggtggtgaaaaagcccgcttactcttgacgaaactcgcgatgaaccatgacaatttcttaatcatggatgaaccaacgaaccatttggacattgatagcaaggaagtcttggaaaaagccctccgtgaattcgatggcaccgtcctcttcatttcccatgaccggtatttcatcaatcaagtcgccactggcattatcgaactatcagatactggtagcaaacgatacctcggtgattacgattactacctcgccaagaaagctgaagaaacagcttacgcagaagcagctagccaaaacagtgcaattatccaaccaagtgccaatgcactagatgcctacaaagcaagtaaggaaaaccaacgtgcacaacggaaactagaacgcgaagttactgctttagaagaaaaaatggccgcactagagactaaggccaacgcaatccaagaacaaatgacccaagcagacgtaattactaaacccctcatgcttcaagaactacaacaagacctagaaaaagtccaagctgaactcgctcaaacagaatcagactgggaagaacaagcgatggcactagaagaactaacacaatagagtgcgtcaaaagccggttatgctgcgagcatcagcctaacaaggcgaatgcttgctacaagcaatcgtttgacttgtgtagctaagcacagaaatatgcctgcaccacataaaaaagggtagcgatcaatatcgttgcccttttgcattttaattaatttgtttgccgaacggacttaacgataacgccgctagcttaaagtgttgccggccaaatggaatcccaataatcgtaattgataataatagcccccaaaagacatggctcgcccacatcacaagaccacctaagaaaaaccaaacaatgtttaataaaaacgaacctgcaccccccgttgaaacaacggttgcgttaaacggcatcaaggtcaatgcgccaatcttaaaacattgtagcccgactggaattccaataatcgtaatactccaggcaatccccagaataaaccaaccgatagcctctactaatcccccgaatagccaccaaattaatgtaccaattaaactcattgaataaactcctttatacttgattaccttaattatacctgattcataaacaaaaaaagcggtagccgcctaaaaataggtcgctaccgcttttcttaatctttttttaaccgattaatgctaacgcttgtttcaagacagtttcgccgtccatcatgccgtaagccttcatatcaattacttcaacaccgattccttttggtgccaatttttctttaaattgaccttccatgaaacgaacttgagggcctaatagtacgcagtcaatttttttagattcgagttggttgtctgcatctgaagcgccagttgcaaaaatttctgcgtctaaaccttgtgcttcagcggccttttgcatctttgaaactaataaacttgttgacatccctgctgcacaacataacatgattgttttttctgccataatgaattaccccttaaattttaattggttagaaagcgataaaaggcttataaaaagcgttttcatttcctctatgtttttagtataagcgctttctttattaatgtcaattaatgttatttaaaaatatataagccgcccattttgttgacctatcccaatcattaacctgtcacctgttattttatcgcatgaaaagtattttttatgctccctactaaacacaaaaaactgctaaccaatgcctaaaaatcgtcggttagcagcttttagctattttattgtttagtatagaatcgttttaattttgtctggcaacgcgattgtgcccgtttcatctgttcaaacgtgcaatctagctggctacacgcttgctcaactgctagttgccccgtcaaaacccgaaaggccactaactctaaagcagatagtgtctctaagtacgcccgcatttcaaccgttgactgatagtatgccacggtatcttcagcgagcgcattgcattccggacaacaatcaaataacagggcttgctgatcgacccgtcgtttctgagcaagttctttgcgaatcaagtttaatacgtggtggtgaaagcgtaatttataaaaaccaccaaaacttttgccgcaattttgatcataacactggcaagtctcataacagacgattcgcgcttcttgtaaccaatcgtcctcatcaaataagcgaatataatatggagtaaaggtgcgataaaccattggtaggtaggctttaaataaaacatccaacgcctcagaatcgttttcaaccaccgcttgaattaagtttgcatcacgttttgctaattccatcaatgaaccacctctcacgcaaccccacgcctttatcttaacaagttatcgtacatttattaagagaacgtttgtttaatcatctttttcagcacttagtgcatctcgcacctgtgcaagttgatctagttgcgccggattccacggcatattccgttgcaaggtccgatcatgataatgcttggcatcatggtcaatttcacggtgcgttcggcgaatctcacgataaaaatcgtgcgaagacacccgcaatgcgccccgtgaaaaaatcgtccactgctcagcttgatcactcgaaaccaccgtcacttgcgtaatcggcgacattaatttacccgctaagccttcgatataactgtccgctgtttcatcctcatcggtgaagacaacttccaaattatactgcacataactttgtttaatccctggcacatacattgcatcaaatactaagatgacttcaatctcacgaaacttgcgatattctgataatatctgcaataagcgatcacgcgcatccgcgagatgatcattttgtttcaacttattcagctcgggccagttcccaatgatattataaccatctgcaattaagatctgttttttcatctgctataccaaaggttgacggctattataagcctgatacattaaaacccccgcagcgacactcgcatttaaactttgcacatgaccgaccattggaatcgtcaacgtttgatcaacttcttttttaacaattggtgaaagccccttgccttcattaccaatgattaagccgattggtcctttagcatcccacttacgatagtcggtaccagccatatcggtgccaaaaatccaaagaccacggtccttcaatttcttaatttcttgtgttaagttcgtgacacgcgccactaggatatgttcgatcgcaccagtcgatgtcttagcaactgttgatgttaaccccaccgcacgatgcttaggaataataatcccatgcacaccaaccgcatcagctgtccgcatgattgaacccaagttgtggggatcttccaagttatccaagattaagataaacggttcttcttctcgggctttggccttagcgaaaatatcatcaacactcgcatattcaaacggtgcgattgctaagataatcccttggtgattttgacggtcactcaataagtccaacttatttttaggcacattttgaatgattagacgtttttctttcgctaatttcacaacatcgtggacaaagtcagccttcaagccatcttgtaagaaaattttattgattttcttcgcatcactggtcttcaatgtttctaaagaagcgtgttttccgatgacgaaatcagtttgttcttcaacaactgcttcttcgacgggtgctgctggtttcttgttagctggacggcgcgttggctttgccgaattattggccgtccgacgactattgaattcgttgttcttttgtttgaatggttggttattattttttctcatgggtcctcccagcgtcgacttgttgaatacaccagtgggctaattcagcgacgcgctcttgttgttcagttaagtatagatagccaaaaactgcttcaaagcccgttgaggtccgataagtcgaaacactcgtattcttggctttcgtataacttttggcatttctaccgcgtttaaaaatattcatttcttcttctgttaaataattatcatcgatcatcaaaccaatcaaagcagcttgcgctttagccgacacataatgtgtcgccacttgttgcaagcgcgttggtttggttaaaccgagttctagcaaatgggcgcggacatacacttcgtaggctgaatcgcccatatatgccaacgcaatcccgtttagttgtaaagcatttttcatgcgcgtctccatctcattccttgtggtgtatcttccaaaataatcccttgttctttcaattgatcgcgaatcgcatcgctgcgggcaaaatcctttgctgcccgtgcatctttgcgttcttcaatcaagctttcgacctctgcgtccaacagttgggccgccttaaactcaacaccaaaaatggctaacaagcgcgttagacgggtagttaaatccactaacgtaccagcttggacggtagcccgttccaggtattgattactaagcttagcgagttcatacaattctgttaacccgttttgcacgttaaaatcatcatccatcgctgtcacaaaggcgtcttccaagcttgccgcttgtgcggcaatgtctgcgtctgcacccgcttcagcagtcgtttggcggaacgctaagttatcgagggtcgtttttaaacgatccaggttcgtttgcgcttcagctaataatgattcactgtagcgaattggtcggcgatattgcgtgctactcatcaagaaacgtaatgcttgtggattaacttcttgaatcaaatcatgcaccgtcacgaagttgccaagagacttactcattttttgatcatcatccccgactgtcacaaagccattgtgcaaccaatagttgacgaaatgtttaccagtcttcgcttcactttgagcaatttcattttcatgatgtgggaactctaaatcttggccaccgccatgaatatcaatcgtgtcgcctaaatatttggtcgacatgactgaacattcgatatgccagcctggtcgccccttaccccaaggtgaatcccaagcaatatcggtccctttttctgacttccaaagggcaaagtcgattggatcttccttacgtagggtttcttcggttgctgtatgttcgctggccccttgttcgagctgatcgatatcttgaccagctagatggccatagtccttaaatttacgagcacgatagtaaacatcgccatcaacggcataggcataatctttagcaattaagtcttgaatgaacgcgataatttctggaatgttttctgtcgcccgcggattgagtgtcgctgtttcaatattaagtgcttgggtgtcttctttaaaagcggtgatatagcgttcagctaattccggaaccgtgatttgttccgcattcgcagccttaatcatcttgtcgtcaacatcggtaaaatttgagacataatcgacttgatagccacggtattcgagatagcggcgaatcgtatcaaaggcaatcgcactgcgcgcattaccaatatgaatatagttatacacagttggtccacagacatacattttaacgcggtctgcttgaatcggtttgaagacttctttttgacgcgtgagggtattataaacggttaacatcgaatcttcctttcttaaacgtgctcttgcaggcttatttctgcgcttaaccaaatttgcccaatcggcgattgcatcgccaattcgtcaaatccagttaatgctcaaaatataaccacctgctgtcgcactcttcttctaaacgtgctttttgaaactgacttctgtgctttgctccataccgcaaacgatcgccggtggcgctccctcacggtattaggcaaatgctcgaagtcaaaccgtttcaaacgcactcttccaaataaaaagcgtcctttgttggttaacaaaagacgccgattgagcgtggttccacttttctttgcaaaaatgccttgaacaggtaacggtgtcccggctaagtcacaaagtcacttggcatttcagaggtgcatttcgatggggcaatcggctttcttccagcaattcgaaagctctcttaacaattggcatcatctacttattctcttcatcaattttaacggtttagttggtctccatgatacagattattgacgaccgtgtaaagtgttctgcgtggctatttttctttcaagcctttttgttgatgcgctggtctagcaaaaatcatccgccccgcagcggtttgaagcgcacttgtcacaatcacttctagcggtttatttaagtaatgttggccatcttcaacaacgatcatcgtgccatcatcaagataggcaaccccttgttgccgttctgttccggctttcaccaccgtcacggtcatcgcttctccaggtaaaactgcaggcttcaacgtattggcgagttgattgatattgaagaccggtacgttttgaaattcacagaccttgttcaagttataatcattcgtcacgacaatcccatcaagtaattttgccaatttaacgagtttactatcgacttccgttaaatcctcgaaatcaccgtcgtacatttcaacagataagctatcgtctttttgaatatcgtttaagatatccagtccacggcgcccacgtgcccgcttcaaattatcagcggaatctgaaattaattgtagttcatgtaagacaaagtttggcaccatcaatgtgccttcgataaagcccgtcttagcaatttcttttattcggccgtcaataatcacacttgtatctagaatcttatacttacggaaattatcgccgactttacgttctaatacatcagcattgcgtttcttaggttgcatcaaacggcgccattcttccattcgcgttgtcccaattcgaaagccgagataccctaaagcaatcatcaataaaatgggtacaactgtatttaatgcaaaaatgggcatccggtatagcggaatcgaaacaacgtttgctaataacaatccaattagtgaaaaaacactcccaaataaaataaaactaggtgattgtttcgttaaggctttttcaagccggtgcatagctctcaacattggtgttgccagcgccaagaataatagatagaaaataatggcccctaaaatggcgttagtaataccgttattgagatacatcatgtcttccaaatgaactaatggccaaaatactgggaacgccgtaattccaagcgcacctcctaagataatgaacacaattcctaatattctttttttagtaaatcgtttttgttgcatcgttcaacctcctctcgctccaacttatgcctagttgaatactttctttaaagtttctgcaatcgtggtcacaccaatcacttgaatatccgtcggtgcgtcccacccttgtaagttattctttggtacataaatacgtttaaagcctaatttagcagcttcactgacgcgttgttcaatccggttgacccggcgaatttcaccagtcagaccgatttcaccgacgaaacaatcagttggtggaatttctttatcccgatagcttgatgcaatcgaaacagccatcgccaaatcaatcgcaggttcatctaatttaacaccgccagttgcttttaaatacgcatcttggttcgataacatgagactagcacgcttttcaagcaccgccataatcaaggagactcgattatgatctaaccctgaagacgtgcgctttgcattcccgaatagtgttggggtaattagggtctgtaactcgaccaagatgggtcgcgtgccttccatcgaaacaaccacggctgaacctgtcgcccctgccaaacgttcttctaggaaaatctcggatgggttcgcgacttcttttaagccggcttcacgcatttcgaaaatcccaatctcattggttgaaccaaaccggttcttaaccgagcgaagaatgcggtaagtatgatgcgtatccccttcaaagtacaacacagtatctaccatgtgctccaaaatcttaggaccggcaatagcgccctctttagtgacatgcccaaccacaaaaatcgtaatctggttcgtcttcgcaatgcgcatcaattcagcggtgacttgacgcacttgtgaaacactaccgactgcggaagtcacttctggttcgctcatcgtttgaattgaatcaatcaccacaaagtcgggtttcattgtttcaatctgatgccgaatattgcccatatccgtttcaggatataagtaaagttgatcgccattcacatcaagccggttagcccgcatcttaatctgggatgcactttcttcaccagaaacataaagaatcttaccaaccttttcaagttgtccggaaacttgtaggagtaacgttgatttcccaatcccaggatccccaccaattagaatcaatgagcccggtaccactccaccgccaagcacgcggttgagttcgtttaattcagttttaatacgcggttccttttgaatattaacggtgctaatttgttctggttcagttgcccgccctgaaatcgtaaaacttgatttcgcgctagctgcaggttgttcacgttcttcgaccatttggttccaagcgccacaattcgggcaccgacctaagaatctcggggaactatagccacaattttggcaaacaaactgagtcttaattttagccacaaagattctccttcattatcgagattagttttattttaacataagtttgtgaattttcggcgacctagcgattaacgtttagcgaccagatgagccaaacccacccgttcgtttggtggttaccgtcgcttcatcatctgcgactaaatatggcatgaagatgccttgtccaattcgttcaccttttttcaagataacatcccgcggactgaagttaaccatttggataaaaatttcaccttcgttggcatcattgccgtagtaatccgcatcgataatgccgacgccgttgggtaaaattaacccttttttgagtgggttacttgaacgattggcgatcattaaatattcgtcgtcttgcatgtaagccttaatcccggtcggtactagaaagggtttcaacgtttttgatgcacgttcaaaatcgtcatccactaacggtttgccatttcgaatcattcggaacaaacgcacaaagttgtaatgccagattgatggcaacacgaagtcctccgcacaagcaaagtcgtagcccgccgaatgcgctgttgaacgcaccggtaaactcaatcccgcctcttggtatttggtcacaatttcaaagccgcgttttttcattcctaaaactcctaatattatcgcccatttgggttctttttgtaccactgtatcataccatgaaaccgcggaggctgtgaataatgcctaaggctgatttaattaaaaatttaacaaaaagcgcccaattaaagcgtttttttcgtataatagatttattaatacaaaaggggtgtcttgatggataagaatgcaatgaaaaagatggcagctgaacgctcagtggattttgtcgaagataacatgattttaggactcggaacaggttcaacagtagtttacatggtggaagccctcgcaaaacgggtacaagcagaacacctcaacttaacatgtgtctgcacctcaattcgtactgaagaacaagccaaatcacttgggattccggtcaaagcactcaacgatgtcgaccacattgatttaaccatcgatggtgccgatgaagtcgatgccaacttccaagggattaaaggcggcggtgctgcgcacttattcgaaaaattagtcgcaactacttcaacccgcaacatttggattgtcgatcaagaaaaagtggtcgatacaatcggtcgcttcccactaccagttgaagtgattccatttggcagccaacaagtgttcaacaaaatggctaaagaaggcttaaatccagaattccggatgactgcagacggccaacacgtcttaactgattctaaaaactacgtcatcgatttacacctcaaccaagtccaacatccccacctactggcatcatggctcagtgaacaagtcggcgttgttgaacatggtctattcctagacatcgtcgaccaagtcgtggttggcgcacctgatggcgtgaagattttaacagcaaaataaagcgtgcgtttaaaggagatttgacactgtgcactagcacagtgttttaaatgaccgacaaaatcggtcgtttgcaatacgtagctaagcgcaagcgtcagctttaaaaagcacgtttccaaacgaaccctcagcggttcgtttttttgtgtcccgtgctctcatataaatcgttttctttcacatttatcaatcaccattcttttagctttatccccgttattcggtttacatctcccatctaatcaactagaattaaactaattcaaaaattaaggagtgattagatgaccaaagaaattacacataataatttaatcaagatgcggaccgctttagctggcgtgccacaagcaacgacgctcaaaaatgctgtgatgacgaatggcattaacgccgttagtcaacgccccgatgctgccgtcacccttgatccaacctactcaatcgacctccccactggtgatgtcagctttcaaaaaaagagtgggcggtgctggttatttgccactctaaatacattacgccacgatttcgaacagaaatatcacgttaagaatttcgaactctcccaaaattatctatctttctgggatcgcatcgaaaaggcgaacctcttttatgaaaagattttagcaactgccgacaagccgattacggatcgcgaagtcgccttcaccctcgctggtcccgattttgacggtggccaatgggacaacgcagtggcactgattcaaaaatacggtgctgtgcccaagtcggtcatgcccgaaacttataacagtgacttaaccactgaattcaacagcactcttaatttgaaactgcgcaaagatgcgattcaattacggcaacttgttgctgacaacgctagcgaaacaaccatcagtgaaacgcggactggtttcttaagtgaaatctatcggctatgtgtttacgcattcggcgaaccagtcgaaacgtttgacttcacctatcgcgatgacgaccaaaattaccatgaagaccgcggtttaaccccgcaaagtttctatcaaaaatatctcaatcgcaactttgacgactacatcaccgttgtcagcagcccccaaacaagtaaacaatacaaccaactctacagtttagaatcgcaaaacacggtagtcgaaggtcacccaatgcgcctcttaaacttaccccctgaacgtttaaaagcactggctatccaatccttacaaaacggtgaaacaatttggtttggcaatgacgtgctcgcggatatggaccgacaaaaaggctggcttgatcgcaacctttacgactattctggactctttggtttcgatttgacgatgccaaaagaccaacgacttgactaccgacaaggcgttgtttcccacgcgatgaccctcaccggtgtcgacctcgtaaacgaccaaccaacgaaatggaaagtcgaaaacacatggagtgccaaagtcggtacaaaaggttacttcagtatgagcgacgcttggtttgacgactacgtttacgaggtaattgtcaaaaaagcgtaccttacaaaagaagaacaagccgcactcacaaaaaccccaattaagctagacccatgggacgcactgcaatagagtgcgtagtaagccgagtttatcctgaggattaacacagaacggcgaaggattgcgccagcaatcgtttgacgttcagggttaaccggaaggatatggcttacggagcacgtttcaaatcagagtgcgccatcaacgggttacttctgagcacttacagcacttgacgaattggcaatgcagtcgccgatttggcaagtgaggtaaggcggaagaagttgttgatgaaagcacgtttcaaaaaaataatgccattcaaaccgggtaatttaatttaacccaccaaattttagaggaggttttccacatggttcaacccattacagcaaaagatattcaacaattcaaagccgatttcaaggcaacaccacaatccaacacaattaaaaatgccattatgaacaacggctttttagccacgagtgctaataccgattcaaaagccaaaatggcccccgttttttcaattgacttagataccggtgccgtttccaatcaaaagcaatctggtcgttgctggatgttcgccgcgttaaatacaatgcgccacagcctccaagaccaattcaaaattaaggatttcgaattgtcccaaaactacaccaacttctgggacaaattcgaaaaatcaaactacttctacgaaaacgtcttgaagactgccagccaaccaattggcgaccgcaaagtcgacttcttaatgacaacgccccaacaagatggcggccaatgggacatgctctgcgcactcatcgaaaaatacgggattgtacctaagtcagtcatgcccgaaacatataatagtgaaaaatcaagcgaactcaacggcgttttgaaccttaaactccgtaaagatgccgttacattacgccaattagtagccgacggtgttagcgaagccgacatccaagctaaaaaagacgcgatgttaaccgaagtttaccggatgctcgtttatgcattgggcgaaccacccgttgaattcgactttgaataccgcgatgatgatcacaactatcacatcgaaaaaggcctcacaccgcaaacgttctatcaaaaatacgttggctgggacctcgaaaattacgtttcattgattaactcaccaactgccgacaaaccatacaaccacttatacagcgttgaaatgttgggcaatgtggtcggtggccgtgaagtgcggcatttaaacctcgacatcgacaccttcaaacaactcgcgattaaacaactacaagcaggtgaatccgtttggttcggtagcgatgtaggccaatcatctgatcgcaaactcggcatcatggacactgaagtttatcaaaaagatgccatgctcggcatggatctttcaatttctaaaggcgaacgccttgattacggtgaaagtctcatgacccatgcgatggtcatcaccggtgtcgacctcgtcgatggtcaaccaaccaaatggaaggttgaaaactcatggggtgacaaagttgggacgaaaggttacttcgtcatgagtgatagttggtttgacgaatttgtttatcaaatcgtgatcaacaaacgcttcttaacggatgaaatgaaacgcattgaaacagaagaatacgatcacccaaccgttctcgcaccatgggatccaatgggcgcattagcaagtcgctaaacagtaaaaggggctgagacaaaagtaaattttgtctcagccccttttttgatattagaactttaatcgtctaaacgtgttcttataagtcatccccttccggctaatcctcagggtatcccgacttatggcacacgcttttttatgttccagtaccgactgcgagcaagctatcataataaatctgcatcatcatttgccagtcactgaattgaagccattcatcccctttatgggcaatccctttttgacctggaaatgatgggccaaacgcgatgatgttcggtaacgcgcgcgcataagtcacgcacgttgttgtgaccggtgtgccatccaaaccagtatctgccgcataaatcgcagagggttgttgaataaatggcaatgttggatcagtaacttgcgatggataacgccgtttaaccgtcaacgtcatccccggcaacatggcagctttaatcccagttaacaactgatcttccgtcactgggattgggtaacgacatgtcagatgcacacttaactgttgggcttcaatcgataccccataaaaagcaagttgcaatgctcctgatgcttcatcttgataattaatcccaaagttttccccagttgactgcgtcccgattttagcggctacccattgataaaattgacccgtttgaccagtgagttgacttgcatcggcaactaacttcggtaacacattatccgccatttcgggggcattgctaggtgcctttttgccgtgataagttttaaccgtgccatcggccaaaatcagctgtgcatgatctggcagataacttttagcgaaccgtccttcaatcgccgtaatttgttgctcagagccgtccgtaatcggtaacgctaactggacatctaacaagccccgttcgccgtagacggctggaaatttacaatctggtgtgaatccggcatatggtgcggaatgttccgccaaataaattggcatatcctgactcccagattcctcatcagtgccaaaaataattcggacgcgttgtttaaatgttatcttttgcgtcttaatcagatacagggcaaataatgtcgataaaagtggtcccttattatccaaaacaccacgcccatacagcatattatctacctgagtcagttcaaatggtggataatgccaatcatcttcaacatccacgacatctaaatgaccaagaatcccaaaataagttggcgcttgcgtttcgtctggtccatattctgcccagccaacacaattgccgacttgccccgtcctaaagcccattcgatcagcaatcgccaacactgtttccaatgcgcgtttcggaccaattccaaacggcgcttcaaacgtttgcgctccacacacactcggcacgcgtaacacttcccgcaagtccgctaagaactcatcagcatgtgcttcaaataatgccttaaaatctgctctaatcggtttcacaagaatggcttctttctattaaatttcgtcaaaattaatatcaacatcgtctaagccagccgcttcggcttcttccgccaaatactgccgatcaatcatcatgataaatggatagtaaattaaaattccaagcactaattcaaataattggaggactgaccctgtccaactcccagttgaaagccacccagaaataatcggtggtgttgtccatggcaacataacgccatttgtatacggtacccatccgagttggaatacaatccctgaaatcaatgtatttaaaaccggtacgataatgaatggaattgcaataattgggtttaaaacgactggcaaaccgaagataatcggttcgttaatcccgaaaataccggggacaattgccaacttacccaattctttgacgcgttttgacttgcagacgattaacatgacgattaagagtgagggggtactcccaccgccaccgtatgtggtgaagatgtcaataaattgttgggtgaaaatatgtggtaactgcgtatgattctggaatgctgttaagttatcttgcgtcagaacgaagaaaattggtgaccacacactgttggtgatagttggaccattaatcccaaaacaccagagcaacattgcgatgaagttataaagcaatacagatggcaatgagttgccggcaccttttaacggttgttgcagtaacgtgtagatgaaattgtaggccgtttcgaaactcgaaaggctaaaaccaattcgaattaagaagaaaactaataccactaagccagccggtagtaaggcatcgaatgattcactaactgcaggtggcacaccatctggcatcttaattcgccagttgcgtttaatcgcaaaacggtaaatttcaacactgactaatgcgataaaaatccctaggaaaatcccgttaggtcccaaatacattgtttgaatggcaccgattgattttttaccaacggtgacaacagtcggtgtcaaaattaagaatgaaataatagcaattgcactggtatgaatcgcttgtaaccctcggtttttaccataggcataggatatcccaaaacaagcaagcaaccctgtaaaactaaacactaaattagaaacagcactaaaccattctgtccagtgcggccctaaaatcccactccaaaattcagtccaaccaggaattggaaaattcccaatcagtaagaaaatcgatgtcacgataatcaatggcgtaatgattaagaaaccatctcgcaatgatcggagtacaacattattccccagtttaatcgcaaccggcatcaaaatctgttcgagtttcttttgcatcggttttgcctccttttaataacaatattggttaataaaatcagtaaaatcagcgcctttaaccttcattttgcataactgcaatgcgtggtcgattgaatccgaaagaccagtaccacccttttttggcatcttcacaatcgttatttgaccttgatactgttgaattaaatcggcattcttttcgatcgcggtcagcccaacaaccggaattgttgtttctttttgaatagtggctgctaattcacacgccatcgtcgaaaagtcccgataatcataggtcggtcccgcaatcacaacgtctgcacccattttctcactcatcttcgcaactttccgattcacttcggctttgttcgcctgataataatcagttccgcaataaaaggtcccgataatttcagagtccattttttttaatgccttatcgagcgtatccgcagcacccatcgctaatttttttccacctaaaggggtatcccctttttccttaccacctaatccagcttggatttgatccaacaagacaattactttcatttaaaaccctccttttaatgttcacgttgcaagatgttatggaacgtgtatttatcagcacgataatgcgagttatcataaagaattggataaccgtccattgaatacgcaaccgtgtgggctagaaaagcgggttgccctggagaggtctcaagtaagtcacttaagcctttttccaatacgactgcttcgagttcttgattggcatacccgattgggattgtttgctcaatcaagcggtagagtgacccttgtgcctcatgggccgttaattctggtagaattttttgtttcagatagatttgttcgtgggtcatcgcttcaccgtctgccattcgcaagcgttcaatctgccaaactggctcctgtggtgctaaatctaacttggaggccacatagtccggataaacgattgtccggcgtaaatctaacacccgcgtgctgacatccaattgaaactgtttggctgcttcggtaaaaccaactaaaccagatgaaccactcgaaattttactttgtgttgcaagtacataggtgccacgatttcgatcgcgtaccacgacatgttgtttaaccaatagatcgattgctttgcgaattgttagccgcgtcgttgaaaattgattggctaaatccgtttccgatggtaatttctgatggatcccatagacccctttttgaatgtcatctcgtaaggcttctgcaatttcaacgtatagatacttaaccattccaaccacttcctctattcaactggtgctttaatccgtttcgcgtaggcttcaagccattctgctgaaatgggttcgatcaccatcgtttgacttggccctggattagccataaaaatttgtggtgccgcatcttgattgccagctgcaaacgtaaactcaacgttcgtcgccacgccccattcaccttgattatttaaggcaaccaacgaaaactcgccagctttgccgtagcgtttttttaatttctcaacaaacggatagactgcttgatcacacgctgcttgtggtgataaaccggtccccatcaggcgcacaatctcatatgaaagacagcccttcattaaatcttcgcctaacccagtagcggttgcgccaccgatttcgctatccacgtaaaagccactgccagataatgcagaatcaccagtccgccctggttttttcataaataatccagaagttgacgtccccgctgccataccggcagcttgatccaaactaaccatgccaactgtatcgtgaccatcatatgggctaagatttttttcgttaatttctttaattcgttgcatccagattttgtgtgcgcgttcggtcaacatattacggctttcaaaaccgttaaacatcgcatattgtgacgctcccgcaccaaccaagaaactattaaaatgatcgtcacttaattgacgcgcaactgagattgggttcttcacatcactaattcctgcaacagcaccaattgcaaaagtgttgccatccatgaatgccgcatccatctccactaagccttgcgcatttggcaaaccaccgtaactgaccgatttaaagaaggggtaatcttccacttttttgatagcggttttaattgcatccgtactttgcccaccattttttaaatcagccatcgctttttgaatcccttcaaaggccattcgccaagtcccaatcattgcatatgtcataactctcatctccacatgtaagcgttttaataatcacggtataatcaaaattgtatatacaatcaatactttttttgaaataaaaaagccaccgcagtgacttttcatttaaagatagaggccaatcaacattcccactagccaaaaaccgttaaagacaattagattctgaaccgctgtaccaaatacaacgcgtttttcctgactcttctgtaatgcaaacccattacgtaacaaagttgggccactcgcaaaagctagcgctgctggccatggatataatttcaggccaatcccaacaataatcaccacgtaacaactatacgcactaagttgataaagttgaatgccgcgcttttgaccaatgtaactgattaatgtgtgccgcccattctctaaatcgactgtgtaatcacaaatattgttcattaacatcaaattagcaatcaggaagacagttggtaaactcgccacaaacaccaaaatcacattcagccaattcagttggaataacattaacggcccatcaaagcgcaaatcgaccaactgatccgccggaacgttgacatacaccgtcaaaaagaaattaccgaaccctaataccagactcgataacaactcacccagtggtaatcgtgaaattgggaatgggccgtaagtatataaaatcccgattaagatgaacagaacactgatggctaacacaattaaatttgtgcgccagaccagaatcagccccagaacggttgccgtacttataaagccgatcaaccagcgtaaagcaaccttaggggcaatatcttgtcgtcctaatgcactggttgattgctggagcgtttcatttttagcgaggtgaaagtcgttgtaattattccatcccgttgtgaagacatcaattaacaccaatgcacagaagtacaacacggtattgatcggatcaatttggtggaaataatacaacgtaaaaaagaacccagccataaagggaatcacgctaccaactttagtgcgtaattcgataaaatctaaaaacgccttaacagacatctattccgcctccgataacattcaatagtcctattctaacagagaatgtctaacaaataaaaaaagagtcggttggaacaaaagtaacttttgccctaaccgactctttcaacagccgaaatttgatcatctaaccatgttctatctgaacagatcgcatacgctgtttgattctattttgttttcaaatcttcaatcgaattaatattcgtcatatacttcggtacagctaaaccgaccttagcaccctctaagttcggacctaagtcttcaatctgacctttgtaatccttgtagtataaaccagaggtcttcggtaaccatgcggaaacttgtgcatcggctgctttagttgcgactgacgcccacatcggttgaatttccatagcttgaatcgttggttgataaccttgttgacgtaaaacttcagccaccacgttagttgacgcgatttctgaatcccaagccacataggttaacttaattttcgtgccatgaacctttttaacacccttagtccactcagcaactttttctggattgtcttgaatccaatcgcgcgccgccttttcaggttcaacaccgtcattgactttaagcattacggtcgacatttcctttggcgtccaatggaatcgatctaagatggtatatgcttctggcatatccttctttagccccttacgaacaaccgtattaatgtgttcagcttgaccaaaaacatttttggggtcttttaaaaacttgattggatatttagtaaacatccaatgtggttgccaaccagtaatgacgattgggcgtttatccgcaatcgctttgtctaacgtactggtcattgccgcagttgagctggtttgcaactgccagttctgatcattcaaatgatacttgttaattgcagtttgtgtggatgccataatcccagcacccgcgtcaattccggtaatcgtgtaattaatttgaccgcctaatttctcatcggtagcgtacggcttagtttgcgaactgcaggccgttagaagtgtgacgagccccactaaggtgaaaaaagctattaatttattcttcttaatcactgaatccctccttaatgtttacgttgccggttcaaagcttgggttaaacgatcaataataatcgctaagattacgattgccaagccggctgcaaaaccgcccccagcatcgttccggccaacagcaaagtaaactcgtgttcctaagcccattgctccaatcattgacgcaatcacgaccattgataaggccaacatcatactttggttaaccccagccattaaggtcgatttcgccaatggtaattgaaccttaattaacttttgccattcagttgagccatatgaatcagaggcttcgatcaattcggttggcacttggcgaatcccaaggtttgtcatacgaaccgttggtggcatggcaaaaatcactgatgcgaaaacgcccgggaccatcccgataccaaagaaggcaacggctggaattaagtaaacaaatgccggcattgtctgcatgaaatctaagatgggtttaaatattgcctgggcaatatcgcttttggccatccaaattccaagtggcaccccaattacgagggaaatcagactcgaggttaacactaacgttaacgtttgcgtcatatcccgccagaaatcaaggttccaaatcaagagtaggccgaggacttcaaagataattaaaccccattttttggtgtcgcgattcgctaaataagtgacgccagcgataatcacgatgaataaccagatggggattaaatcaaacacccattggaaagcgttgataattccgccaataaaattcgttaaaccattaaaaaagccagtaaattgtgtcagccaatcgacaaagtgatccatccaattggcaattggtaatttagcaatcgtcattaaattaagcaaaatggttcacctcgtttcctgcaagtgcccctaagacggccccgcgaataataatcccacgtaattgttgcttatcatttaagacagcaaacggaatgcccgtttgcgaaatatcatctaagatatcagcaattggtgtctcttcatcggttgttggaacttcagtattcacgattgattgcaaatcacgactttctttgcggactaactcaagtacatcacgcgcatcaataatcccaactaactcacgtttactgttgacaacgtaagcattagaaacttcattttcacgcattcgttttaaggccaaacgagggccatctttttcaatattaacagtcgttgggcgaatcataacgttgccggccgtgtaaactttactacgatcaacgttttcgatgaatttctctacatactcgtcagcaggccgtgtcaagatatcttccggtgtcccggtttgaacgatttccccatccttcatgatcatgatgtggtcgccgattttgagcgcttcatttaaatcatgactaataaagataattgttttgtgcatcgtttcttgcaagtcgagtagttggtcttgcatgtcagaacgattcaatggatcaagcgcagaaaaagcttcgtccattaataaaatctcagcatcattcgctaatgcacgcgctaaaccaacccgttgttgcatcccaccagataattgtgtcggatactgatcgccataaccatttaaaccaactaaatcgagtgcttcattcgctttttgttcccgtgtcgccttatcaatgccttgaatttcaagcccatagtctgtattttcaagaatcgttcgatttggaaagagcccaaaattttggaataccatgctcatctttttacgccggacttcacgtaatgccttcttatcaatctgcattaaatcctcgccatcgattaatacactaccttcagtaggctcaatcaaccggttgatcatccgaaccaatgttgatttaccactcccagatagtcccataatgacaaaaatctcgccagattctacttcgaagttagcccggtcgacaccgattgtcgcacctgtttcctttagaatcgctgcttttgattttccttgtttcagtaattctttggcacgcggcacgcgcttaccaaatatttttgttagatttttgacttgtaatttgacagtcatagaatccccctttgatttcattttctgaaaactatatctaaaaagtatacaggtttattgtgaaagttgcacaccgtccacttttattctcattttattctaatgtgatagttaggtaaccaactttctttaaaaattaaaaaatcgctagatggggctttatgttagtctttaaaaatcagattagttctaaaacggaaccaatctgaaaatgcaactattttcctttgtacattaaaattaaatgagaattaatcccttttaaaattcacaagcccttaattaggccatcaaaaaaagcgttgaccaaatcggtcaacgcttttaaaaaatttagccatgtactgcttttcgttgatagcgatgatacaaagcaagggccataatcgtaaagacaatcggaccaatgaccatccagaaggcatctaaatattgaccttctaacatcggttgaataatcgtaaaggcaattccgaagacaaggactaagtcgaccacaatcgtcaccgccttaacagcaactggtgatttaaagaattcgtaaggccgttccaaatctttgcgtgccttgaaatatggaaaggcagtcactaaaaagaggtatggcaacgatgttgaaacgttagacatcaaagtcaagacattatagaagtcaccggcagctttaccaccaaatgaaataaccgcgattaaaatgcagactaataatgcttgcgcccacattgctttttcaggcatgccatgcttgttaacttctgcaaagccgttcggccagagtgctttaggtgtcccgagtacaaatgactttaatggtgaataaatcaagacggcaaatgcgcctaagtaactgataaacatgattaaaccggtaatccgagcaaaggttgttccaatcgtcatcgcaacgggtgtcgtcatcccaaaggcatggccgaattgataacccaagttttgcataagaacataagtaatattgcccatgttagctttattcccgctcaagacttgttgccagttcgttgagatgccccacataaagattgcaaccgcgtagattaatgtaatgaagactgtcgcaatcattaaccctttagggaaagtcttttcaggctgatccatactatcggtaacaccgcccatggcttccatccccgcgtaagcaaagattgagaagacaacaaatgataacatcccaattggtgtttgatagctactcatcggactcttaacaaaggtcgtcgtcccatgaatcggttctgccaaatgaaaacccgttttaaaccaaatcgccacactaatcactaagaatgcggcgaataaaaaggcaacggccatcccactgaatgacgcaaacttttgaatcttatcaatcccacgacttgataggaaagttaataataaaatccaaagaattcctaagacaccgaccacttgagtgccattcatccctaataaatgccaggttgctgtttgatctgaaccttggaggaacgttgaaaacggcacccacactttagcagctgttgacaccatccagacaatccatgacgctaaccagatgaacgtcccgatgaaagccgcctttttaccaatggatgcttctaaccaagaatagatgcccccgcgtgattctttcaaagaagaaccaaattcagcaaacattaatgaagttggtaagaaaaagaaaattgccgctaagatataccaaataatgctggcatagcccattaagtagaaagcaattgtggtattcgcaaagccgaagattgacccaaaaatcatcaatacgagaccttgaacgttaattttttttgatttcgccatttcaataagtcctttataattgtattaagtagaataaatatacaattcaaagggcataatgtcaattatatttgaataaatcaaccgtttccagcctttttattcatgtattcataattatatacaatttacgccacaaaaaaagacgttcacttttagcgaacgtcgattgccttatttaatgttggcaaccttagcgactttgccactattgacactcgcgctaatttccccttcttgaccgttattgataacaaattgatcggttgcttgacaccgtgggcaagttgtttcaatttgaaacttggtagagccatctgaattatcttctagtgctgtcttcgtcgtgatttccatcgctggatgttggcacttatagcattgaaagacaataaaacgccgttctacaaattcatctgctaaactcatgtgattcatcctttcaactagcttatttaagttcattctagcagtctgctattttttagggtacctttttgctcacgtgtcgttttctgaaagcatcccttagaaatgaatcaaaaggcgaacgattttaaagtttaaaagcattatggtatgtgatatacttacaacacaccatctagaaggagaggtttaaaagtttgccaatcacactaaaagcaagttatttttctgcaaattcaccaaattatagttcatttcacgaatattcactgatagaaatcagtgataatggtcaaatcacaaacattattcatcaaacggcgtcagaatactctgagcgattatcagctgcgcgccaacatgaccacttaatcacactcgctcccggacacttcttgttaccaggctttatcgatctacacaatcatgcgccacaatggccacaagctggaattgcccttgatcgccctttagctgattggctcaatcattatacctttcctcttgaagcgcgctacgccgatttagatttcgccacacctgtgtatcaagacttagtgaccgaaatgctcgctaacggcacaacaaccgccctatatttcggaacaattcacaattctgcgaatctacgactcgcagaaatttgttcccaagcagggcaacgggctttcatcggaactgttgcgatggataatccagatcaaacaccagactattatcgtgatgcttctcctgaagaagccattaataaaacacaaacttttgttcaagcaattcaagatacctatcgtaatgggttcattcaacccgtcattaccccccgcttcatccctagttgcacaactgaaacacttcagcaactcggtcaacttgcacagtcccaacacatcaccgttcagacacactgcagcgaaagcgactgggaacacgattatgtacgcgaacgttacggccatacagactctgagatgttgcaatcattcggattattgaatcaacattcggtattagcacatgcaacacaactgacaactactgaccaaagtatcattaaaaccgaacaagcagcgattgcgcactgccctatctcaaatgcctattttggtaacgggattctccccgcacacgagttacttaatcaaggcattaaaattgggcttggcagtgatatcgccggtggttatacccctagcttatatgccaatttgcaacaagccgtaacggcctcccaaattcgacaagacggggttgacgccaccattgcggctgaccaacgcggtgttgcgaacagtcggatcagtgctaaacaagctttttatatggcaaccgtcggtggtgcaactagtcttggcattcaagctggtgccattgaatcgggattgcttgctgatttccaaatcgttcaagcgccaccacgctttgcaagtcttacaccagatgaacaactcgaacaacttttattccgccacaccaaacaccaaattaaggccgtctacgttcaaggtaaactggtccacgaaaaggagcacaactggtatgaatgaacaatctcaaaaattaatggtcggtcctgacgagccgatttcgaatcaagaagctggcttcttaggactacaacacgttttagcaatggatgtctacgttccccccgttatcattgccggtttattggcgatgggtcttgatgcaaaagccggcttaattcaagcgacattccttgctgccgggattggtacgattcttcaaaccaaattttttatgaaaatgcctgtttcccaaggcccttcatttgttccaattggggcaatcgccgggatttactttgctagtggtgctaaagacggcgggatggcaacggtgattggcgcttcaattgtcggttcaattctgttaattcttctcggcgtcaccggcctcttccaaaaaattattaacagcttagtcccccaagtcgtcggtggcacaatcatcaccatcgttggtctttcactgatgccatctgctttaggtgataacattttcaaagcacagggcaatatcaatgagaacttactcctggctgttgtgaccgtcgccattctaattctttgtgtttcgctaggtatctacttccctaaattacaaaaactcttcaaagttagttccatcatcatcgccttattaggcggaactgttttagcaaccatgcttggtaaatttgactggcaaagtgtgaacgaagcgagttggtttagcttgccaagtttcaccgcattccactatggtatgcacttttcgatgacagcaatcatgaccttcgtcattatctacgccgttttaatgaccgaaacgaccgggacttggtttgcaatgagtgccgttacggattcgcccatcagtaagaaacaatggaatcacgggattatcggtgaaggaattagctgtttaatcgctgcactcttaggcggctcaccagttacagggtatgcaactaacgccggcattatttcaatcaccggtgttgctagtaaaaaagtattcgtttctgccgggatttggtttatcatcttcggcttctttaataaattagcggccttcttatcagcgattccagccccagttattggtgggattttcgccatcatttgttcaactatcatgctcaacgggttaaatgttattcgcacactacacacccaagaacgtgatatgtacatcatcggaattccaatcattctatgtatcgccatcatcatcatgccacaatcattggtgaaagcaacgcctcaaatgatccaatacttacttgaatcaccaatttcgatttgtgcgcttgccgcaattattctcaacttaatcttaccaagagacagacaaattgcgtttaattagactgaaataaaaagaagccccctgataaacttttttatcagggggcttcttttttcgtaaatgtatttcccgattgagacagcacactttttttaaacgtgctccagcaggcatattcctgtgcttaaccaaacttgtcgcatcggcgattgcagacaaatccagttaatactcgaaatataaacgcctgcttgcgcactcttttagacactgaccattcgaatcgtcatgatgttcttattcatcgagatatcttccacaatttctgcatattgcatttcccggggaatttcgatgcgatagacgttagtgtaaatcgtatcacgttcgttttgcgttactgagaagttcacatcgcgaatttgaatctgatgttgttcaaaatagctctgaataaactccttggtttccaatttatgcttatacttaatttcgatttttttcaacgtattgatgtgaataatctttttcaagaagacaatcacgaaaatgacaaagaccgcactgatcaccgcaatttgatagtagcccatcccaattgcaagtcctaatcccgcagtagcccaaagtgaggccgccgtcgtcaatccttgaatcttgtggcgggtgacaataatcgttccagctcctaaaaaaccaatcccactgacaacttgtgcaatcagccgcgcttgatcagaacgaatagtggtactaatcgcactatgcgctaatgcaaattgaacgttttgcgctgcgatttcctgctgaatcatcgcaatcacacacgcaccaatgcagaccagaatgtgtgtccgcattccggctgggcggttcttatattcccgatcagatccgataatcccagcaattaaggttgccagtagcagtcgaataatgatatgcacactcgttacttcaaacaataaaatccctccaaaataataccttatctctagtctagcataccgaacaaaaaaagcgctcgtcaatccatatcaatttacggattaacgagcacctattcattagccaactaggccgattgtttgtagaatcaaatagatatttaaaagcgtcaacacaattgtgacaaaccatgccgtatatttcacccaagggcggttaacgaatgggcccatgattttttcatcactcgtgaacattgtcaatggaatcatcgagactggcaatgcaacactcaagaagacttgtgagtaaatcaagaggttttcaacttgtgcttcgttcccatggtagtaaaccgtgaaaataataacaggtaagattgataacccacgggtaatcacccgtcgtgcccacaatggaatcttcatgcgaacgaaaccttccatgacgatttgtcctgaaagtgtccctgtgatggttgaattttgaccagaagctaataaagcaacggcaaagagtaaactcaacattgggctagcaatgctcccaacaatttctttgttttgtaaagcattgaataagtcaacgaatcgtcctaaatcactgttagttccaaagaacattgctgcccctaaaactaagagtaaacagttaacgataaatgcgactgataattgaatgtttgaatcaatgactgtaaacttgattgctttcttcttttcggcgtaatcgtcacggtcatattgacgtgcttgtgcgattgacgaatgcaagtagagattatgcggcataacagttgccccgacaatccctaatgccaagaatagcatcttctggttggtaacaatccgtgtacttggtacaaatccgcgcattacgtcgcccatatttggttgcgctagaatcacttcgtataagaaaacgaataaaataacggccaccaaggttgcgacaatcgcttcgatcttccggaaaccaagtttcattaatagtaataatagcaagacgtcaaatgcggtaattaagacaccccagagcaatgggatgttgaaaatcagttctaacgcaattgcggaaccaataatttcggcgatgtcggtcgccataattgctaattcggtgacaatccagaggaaaatccccatctttttaccggttttggcccgcgtcatctgcgctaaatccattccggtcacaattcctaaacgcgctgccattgcttgtaataacatcgcaattaagtttgatactaggatcacactgatcaaggtgtatgcgtattgcgcaccaccggcgattgacgtgatccagttccctggatccatataaccaacggccactaacgcaccaggtcccataaaggccatcaacgtccgccaaaaaccagcgttcttgggaatcgcaaccgtgttattaatttcttcaagactcgtgccatcagcatagtgtatgaatttctcatgcttttgttgattaagttcacccttttgtgaatcttctcgctgcttcttatccatataagtacctctttctcttcgattgagtcgttcaactattaggattcaatgactttgattttaggatgacctaactctgatcgtctccagtgttcaaattaatccttacccattctatcatatctctttgatgttgtccctgaacaagattaaaaaaaagctgtttctcagcgtttttttaggtaaccgattacaaataattgcccaccttaagtgctattaaaaatgacgttgactgtctttaacagccaacgtcatttaacttttatttagacgactaaacttaatagtaaaacgccaattaacccaacaatcgaaatcaatgtttccaaaactgtccaagttgcaagggtttctttgacacttaaatcaaagtattccttgaacatccagaacccggcatcattcacgtgggaagccgctaaactgccggctccaattgaaaggaccatcagtgcagggttcacaccggctgattgcattagtggtaagaccaagcctgccgccgtcaatgacgcaacagttgctgaacccaatgccacccgtaagacaactgcgattaaccaacctaataatagtggtgataaattggcatttgcgaataatttagtgacactatcgccaaccccaccgtcgatgaggatttgtttaaacgcaccacccccaccaatgactaggagtgacatcgcgattgatttaacggcttcttcaatcgtcttcataatcgctagggttttaatccgacgcgcccaacccatcgtatacatcgcaaccatcaatgaaatggtcattgcaatggctggtgtcccgataaaaccgacgattgaatccagcatcgttggatttttaggtaatttcccgccgttaaaggccatttgataaatcgtggtgacagccatcaaaatgactgggaataatgaggttatgacactaattccaaaccccggtgtttcgtctaatttaaaggttttctgaggcccaagtgccgtcagattaccttggcgcgcgaacgcatctggtactaggcgttttgcaatcttagtgaataatggaccggcaataatcactgaagggatcgcaattaagaccccatataacaatacgtgaccagcatttgcccctaaagctgaggtaattgctgttggtgctggatggggtggcaagaacccatgtgtgacagaaagtgctgcagccatcggaattccaaggtacaaaattgacacacttacttcgattgcaatcgcgaaaacgattggtactaacaagaccatcccaacttcaaagaataaggcaatcccaatgatgaacgaagccaacataattgcaatttgaagtcttttttaccgaacatatcgattaaggtatgcgcgattctaaacgcgccaccagcgtcggcaactaaccgccccatcatggcaccaaagccaaagacaattgagagctcaccaagttgaccgccaatcccgttttgaacactggttgcaatgtccgttaatggcatacctaggccaaccccaacggccattgccgttataactaaagcgataaacgtattgatcttaaatcgaataataagggcgagtaataagataatgcccaataataggactactaatgccataattttccctattttcaataatgtttgcgctatcatgatattgttaaaagtaactgggctttcagacccagttcacttcgttactctttaacttgcatatgtttgcgttggaagtcagcaattgcgccgtattccgtatttaattcccgtgttaatcgaatccagattggtaatagttcgcgataaacttcaaagttggcttcttctggatgatgcacattcgtcacaccaaccatttctttgacagctgatagatcatccactaagcctaaactatacatccctaagacagcagcacctaaacatgagctttcgaaactctctggaatcgtgacgtcttgttcaaagacatccgccaacattgggcgccataattctgaacgggagaagccacccgttgcctgaatactctttggtttacctgccacaccttcaatcatcagcatcaccatgtataagttataaacgatgccttcaagcgctgcacgcaccatgtgcgcccgcgtatgttgccgcgtcaaaccgaagtatgatccacgtgcatctgcatcccagattggtgcccgttcgccacccaagtaaggatggaataagagtccatctgaaccagccggaatttctgccgcaatttgtgtcaaaatatcgtatgttgaaacatgcatttgttcagccttgattttttcaggtgcaaaaagttgatcgcgcacccaacggaagacaattcccccgttattgactggtccaccgaccacccatttatccttggttaaggcgtaacagaataatttaccgtttggatcaaccactggatgatcaacaaccactcgcacggcaccgcttgtcccgatagtaacggcgactacgcctggatcaattgcatttaccccaaggtttgataaaaccccatcgctggcgccaaagataaatggtacttcagcaccaatgccggttaattcaccatagatcggatcaatccctttaacataatccgttggttcgactaattcaggtagttgttggcgtgtgacaccagccacttcaagggcttgttgatcccaatctaaattaaaaatgttgaacaagccggttgctgaagcgattgaataatccatttgatacgtatggaaaagtttttggaagacatacgttttaatatcgatgaattgactagcttggttgaacaattcaggttgcgcttctttcagccaaatcagttttgaaagtggcgccatcggatggattggtgtgccagtgtgttgataaatggcttggcccaacccattttctttcaattgttgacttgctttagcagctctattatccgcccaagtaattgcccgagttagcggttgatcatttgcatccatcagaatcaagctgtgcatcgcagccgagaaactaacgccctgtaattcgccggcttgaacgttgcccttgcgcatcacctgtcgtaatacttctgacactgcattaaaaatttcatccggatcttcttctgccatatcgggtacggtttgatataaaggataaccaacgtttgcgtaagctttaacattcccttttaaatcatataaaaccgctttcgtacttgttgttccaatatccgcaccaatcatatatttcatcataattacctcgtttatgtggtgtttactgactacttactaggataccacttatttcttatcaactgcatggccgccgaattcatttcgtaaagcagcgacaactttaccagtgaatgtatcatcttcaagtgaacgataccgcatcatcaatgataaaccaatgaccggtgttgggacttgtaatttcaaggcttcatctaatgtccattttccttcacctgatgagtgcatgataccttttaagccttctaagttagggtcttttgcaaaagcagattccgctaattccatcaaccagccgcgaatcacagaaccattactccaaaccttagcaaccgcttcgttatcatattcaaactcaccatgtgataacacatcgaatccttcagcgatagattgcatcatgccgtattcaattccattatgcaccattttgagataatgaccactaccagccttcccggtatagagatagccatctttttgagcaatatctttaaaaatcggttcaatctgtttgaagacttccgcgctgtcaccgccgatcatgaagtttccgtctgcgttagcaccgctcatcccaccagaagttccgacatcgaagaaatgaatcccttttgcggcaagcaatgcattgtgttgtttagaatcttcgaaaaatgaattaccaccatcaatgacaatgtcaccggctgtcaatttggtacttaacgtttcgattgtggcttgtgttggcttaccagcaggtaacatgctccacacaattttaggttgtggcaattgtgccaccacatcatcaatatcctttgcaggtaatgcacctaagcgggttgcttcttgaaccgctgcttcatttaagtcaaaggcgacaacctcgtgcccattacgtcgtaagttagcgaccaagttaatccccattttgcctaaaccaatcattgctaatttcatctttgctagtccccttatccacaatttcatgtcacttttattaatgtcttcattatatgtaaattattttctttaatcaaccctttttgagaaaataattttctttgttgttttttatgctatactatcgataacaggggggcacttcaatgacacaaaacatcgattccttactccgtgcgtactacacgaatttaagtgaaaaatacaaacaaatcgcagattacatcttaaaaactgaacatttcaatcaaagtttaacgattcaagaatttgcggctgactgtggtgtttcaacagccactatttcccgtttcgccaaaatgttgaccttcgcaaacttccaggcactcaaaatggcgttacttgctaaacaagcaaccccaacagataatccactcttccatgaaattagtaataatgatgactatctgaccatggccgataaaattttcgcatccaatactaatgcgctcaaagcaactcgttcactactgactgaagcgcaattacggcaagccgttgattatatcaaccaggccaagcgcttaagtttatttggcttgggcgcttctggaatcgtcgctcaagatggctaccacaaatttttacgaactgcgattccaactgtttacagccaagactaccatctacaattgatgcaggccacccaactcaccgaacaagactgtgcgctgattatttcacatagtggtcaaaataaagatgctttagaaattgcacgcatcttaaaagaacgtcacgttccactgattgtcatcaccagttttggcaattcaaccctcgctaaattgggtgatgtgacactgttgtccatttccgaagaaaccaattaccgcgccgaagcactacacgcgttaattgcacaaatcagcatcgtcgatagtctgtttatgatggtcgccgttaataatggcccacaaacagaacaaagtttcaaagccattcggactgaaattgatcggactagacaaaaataaaaaagctgaggttgaagaaatacttcaacctcagcttttttgctgttctattttgaacatctaaacgtgctttttggttgcaccaacttccgcttaataaaaaagtttacaatagttcagcaatgatttcttcgtcttgatttaagaattgatcgccagctttgatttctgtcactttaattccagcaagtgagcgttcaatcaaggcatccacatcgatgcgttgttcgtagaaccgggtcttatctaagttaggccgggtcttcggtgctggtggtgcaaaaatggtacagcaatcttcgaatggcatgattgataattcgtacgtatcaatatccttcgcaatttcaatgatttcattcttatccattgtcgcaactggccgcacgattggcgttgttgtgacatcattgatagccatcatactttcaagtgtttgtgaggccacttgaccgacagattccccattaaaaatggctaaaccttggcgcttagcacggatttgatccgttaaacgcaacatcatccgccgttgaatggtcattaagtaaccttctggcacagaatgcttcacttcttcttgaatttccgtgaatgggacttcgataaacttaatcccaccaacgtatggcaccaatttcgccgttaattctttggccttattcaaggcattgtcgcttgtgtatggtgggctaaagaaatgcaccatttcaatgtcgacaccccgtttgagcgttaagtaacctgctactggtgaatcaatcccaccagataacatcaacattcctttaccggcagaaccgactggtaagccaccagccccttgaatcacttggttggttaagtaaatcgcatcttggcgaatttcaacccgcaaagtaatgtcaggttttttcatttgcacttctaattcaggtaattcatctgataagtaaccacctaattcgcggttcatatcattcgtatccaagaagaaattgtgatcagaacgacgtgtgttaactttgaaagacatcccaggtttgccgatttctttcatcatggcaagcgccatttctttaacagaatctaaatcacgatcaacttggatacttggtgagaagttttggatgccgaagacgtgacggagacgttcgataacgccttctgcatcgtcgccgtttaaaacgatatgcatccggtcacgtttagggtgaatccggagttgtttatactcgtgaagcgcctttgtgacgttcccgtttaaccgaccgataaaatcgttccggtttttaccctttgtcgaaagttcgccgtagcgaaccataatttcagtgtattgcatgcctatctccttttagatggtagtttacgaattaatttttttgaagcgttcgttaatttgatcgaacgctttgatgaatgcatccgcttcttctagcgtattgtattcatcgagggatacccgaatggcgcttgtcgcaattttttcattgacgtgcattgcctttaaggtactagattcagtccctttcttcgaagagcaagcacttgtcgttgaaatatagatttcgtgttcttcaaacgcatgaaccgttgtttcaccgcgaacacctttaattgcgaagcacaaaatatgcggcgcaaaatcaggcgtcagttgtgaaaacataaccgttttatccgattgactgatatggttaaagagtcgttctcgaatagctgcttggcggtgtactttttcagtctcatcggtcaataacaaacgtaaggctttggccattgccgcgatggctggcacattttcggttccagaacgtaaatcatgctcttggcccccaccggttaaaagcggcgctaaatgacgcccgcgtttcttatacaaaatcccagtcccccgtgggccgtggaatttatgccctgataaggtcacaaaatcaacgcgttcgttgaaaatcgcctcttgaatgcctttgccaatcccttgaacggcatcaacgtggaaatgaatattaggataatccttcaaaatatcagcaatggcttcaagtggctgacacgttccgatttcgttattaatggccatgatcgaaactaaaatggtatcaggccgcaatgctgcttttaagtcagccggatcaattcgaccaaactgatcaacgggtagataagtcacatcaaagcctaatttttccagttgctgcatggatttaatgatggctggatgttcaaccgatgtcgtaattaaatgtttcccaaacgcccgtttttcaattgccgtgccttttaagacccagttatcgccttctgttccaccgctggtaaagaagatttcatcgtggtctacgcctaataaatcagcgatttgttggcgtgattgttctaaaatatgaaaggctttttccccaatcacatgtaaactagaggggttgccgaagaactgttcactaaccgcttgataggtctgaagtgcgcctggcgcgattttagtggtggcactattgtcaaaataaatcatatcgatccttcttactaaaaattagtgttttaacgttgtacattatagcaaattggttattaaagacaaccaattaatctttaacaaaacaaatccgagacaaaatgcgtcttgtctcggactggtgagcatctaagtgactaattagttgcgtctgacttttggtcgtaataggccttttcaacttgtgtgtaagcacctggatcaaccttttcaagggccgttgccaataagtcgacagctttagcatagtcgtattcttcattaaaaatagtttggaccgtcacacaggcttcctggatggcgggaaaatctgcacgatatcggttggcatattgtaacaattgctccgtaatcaatgcactgtcaattaaggtatccgtcttggccttcaattcatctaaatcctcttgaacgagaattaattgcttcgcgatatcgtctaaattaatcttaatttgattcaaatcatgatcaagtttttgaatctcatcagaaacaacgaagaagaaatccaaatatttctgttgtaaaccaggtaaattaaccttttcaacagcgcgcttcaagttacgtagttcaagttcaaactggcgtaagttttcattagcgacgacttcgccttgatgcaaactagcaacctgatcatgaattgcttgttgtttttcttcgatgacagttagccgttcgtcaatcccggtcaaatcttcagcaatcgccgtgtaaaccgcttcgtggttggcaatcttcgcttggtgcccttcaactaacgcctgttcttcaccaatttgcttttgtaattgtttggcgcttgccaactcaccatgtgtgagtgcataactctgattgagatgatcgagttccaataatagctcatggttctgacgttcagcatgttgcacgaatgtcgcggtggttggcaattgcgtcgcgactgccttcttggcagtcatctcagcttctaattgatcatataattgatcaatgccacgtgcaatttcatcgttattggcttcaaccgactcaatggccaaatcacttaacaaggtagtgctcttatcaagttgatccattagttgttgttgtttgacttcaatctgccgatcatcaaattgataatgttcttttaacatttgatggtaggtatcattaatttcaaccagttgttcgggaaactcgttagctaattcgttatagcgctttggaatccgttccatctggtcttctaattgcgttgtttcagtaattaatttctgcaaaatggccttagcccctagatggtcgccggctgttgttagttcgttggcttcgtcaaaatccacctctaagcgacctagcgttgcttcaagcgcatctaatgcaggtccaaacgaaaaactcttagtcaacaaacgtttacgtagttgttgatattgttctcgtagacgctgaattttttgacgtgtatcggcttcattggcaagtagattttctaaagcatcttgaacatccagtaaatcttgatccgtttcagtcaagtacgcccgcaattgtttgagaatccgtgcaacctgaatgaattggtatttggcattggccgtttccgcatcaaaaagatagccttcaatcgtgctgaagttatggttggtaatctgctcatattgtttttcccaacgatcaaagttttgcaaactttcgcccgtcaaatgtaacgaccgtaacttcgttaagcgttccggaatcggcaacgccattaagtcgcctttatgtgcttctagttgtttaatttgtttgataaaataacgttgataaaaaacaacacttaggtagccaatcagtgcgacgactacgattccaatgagaatgtaaaacattcaaagacacacccttttacaatttaaatcagatttgttagtccgttcatccacttcaattcattaaactatgtttgattatagcatgaataagataacggttcagcaataattagcgataaactttagaaaagctgcaattttaatctgaatttgcttgacgttgccgcacaccgtacgctatactagccattgtgtaaaataatgcagcagtaaacggtaaagccgtcaacagttcatttgcccagagttttggttcaattgtgtaaccttgcggctgcaaaggtgaagattgttaataagtgaactgaacgattactaagtttacatcggattattttactccaaaacatttattggaggatttttttatgtcacgttatacaggtccaaagtggaaactttcacgtcgtttaggaatttcactatcaggcacaggtaaagaacttgctcgtcgcccttacgctccaggccaacacggtaacgaccgtcgcggtaagatttcagaatatggtatgcaattgagcgaaaaacaaaaacttcgtttaatgtatggtttaacagaacgccaattccggaacttatttgctcgcgctggtaaaatccgcgaaggcaagcatggtgttaacttgatgatcttgctagaacaacgtttagacaacattgtttatcgtttaggtttagcaagcactcgtgcacaagctcgtcaattagtaaaccatggtcacgtaactgtcgatggcaaacgtgttgatattccttcatacgaagtaaaacctggtcaagaaatttcaatccgtgaaaaatctaagaaccttgtaatcgttaaggatgcaatcgaaggcacagttggtcgcccttcattcgttagctttgatgctgacacaatgaaaggttcacttgttcgtttaccagaacgttcagaattagaaccagaaatcgacgaagccttaatcgttgaattctacaacagataagcagttatctgttcaattaaaagagtcagacttaggtctggctctttttttgcgcatttaaagacgcgtgcctacttagcacacgcgtctgatttaatctatttagtctgtaccaactcatataaaggcaccatcttcatcaaggtcgtttgaatatcggccatgagagcttcgggttggtcgaataatgggttgtctttcagataaacttttccgaggagccactccccttttttggtcttagcaaacttatcttgaatcagtttcaagttctccgatgacattgggaatttttgcttggtcatgtgatcgtagcttaaatcatagtcggcaaagtcccttaagaggctttctgtttggcttgccaataacggtgcgtaatccgtcttatctggcatctcagccattaaagcaaaccaaacgaagatccgatcatcccaaaaaccgacttcaaagtgcggcatcatcttatacccgcgtgagctctcactaagtgccatccaagtattcattggtggatttttgaagcggcgtaaatgcttggcaatatgcaacgagaattcgcgttttgtttctactacgagttctgcttgcaattgcacaccaaatacttcaaactttggatcaagttgcgtataaatcttgtctaaccggccctttaaggtttggtcatcaaaaatatcaaaatcagcacgtgtaaacatctttttcctccaacatggtatacttaggtttaattctaatatagcacaattcagaaatgaggcgactattttgtcagataatgatcaattacaacaacacttggatagtgccatgcacggcgcaccacaaaccaatcccgatgaacgccgccgctacctcggctcattacgtgaacgcgtcttcttaggcattactaaccaggaactcgccactgcgcaagctaaattcgaagcgcatcttacggattataagccctattccgtcttattaaacggcaagaatcccgctgctaccgattatttagtggccctttcagcacacgggattccgttcacgctcgttaacaacgaaacagccaaaaccgaaccaacggccttcggtttgttagtggttgccaaagacgcgattaaccatgaggcaattacgctcgatacactataccctgatccaaaaaccacaacgcaagatgcacccaccaaaaaaggtggtttcttaaaacatcttttcgattaacactaaaaaggcccgcacagtttaacttgtgcgggcctttttgcattactttagtcggtttcaatcgctaattctgggaaaagtaattgtaagacagtcattgaaacgcgccgcgcttgacccatcattgggaacaagtgcatcaacatcgctggattgtagtttgcttctagcacaaccgccatctcagggtgttgcggatcatatggttggtataagtttggcacaatgatatcgattcccgtgatattgaggttcaaaatttcagcaacctgttcagcaatcgcaaagtaactttgatccatctcatcggtcacgtcaaccgaatcaccaccatttgagacgttggaattttgtagtaagaagacctgtgaaccacgcaatggcacatcttcagggcggtaaccttgttgtttcaacatgagcaattcccgttcaccgaggcgaatgttttgcaacggtgtcaggtgcgcttcgccacgtaatgggttgtcgtttttcttagcaacaagttgggcgattgttgaacgaccatcccccacgacattggctggaatccgttctaaaacagcctggaccttatgattcatcactaagaaacggtattccgaacccgcaatgaattcttcaactaaaatttgctgatcatacgtttgtgccagtttaaaagcagcaatgaagtccgcttcacttggacgcgttaaaaatgtggtaatgcccgcccccatgttactgtgttttggtttaatgacaatcgcgcgctgaccaaacgccgcttgataatctgctactgccgtctctaaagcggtatattcggcacccgctggcacccgcataccatgacttgccaataaaattttagtcactaccttattatccactaacggcccactaattagccgatctaaactcgttatattcccatttttgactaattcatgatgatgttgataggtcagctcaataaattgttcatcgcgatccaaaacagccacatgcagccctttttggaaagcgtcaaacatcagcatttgtgttgataattccatatccgtgtatccctgtaactgatagggagtctctgtcagctcacatttaaaacgttttgcctgtttgagggcaaatgcctttagcgagtcctcttcaatcgcttgtgttaagcgataactcaaggtttgtcgatggtcctgaacacgctcattcatcactgtccaagcttgtttaaaacgctcattcagatgataatccgtaatgaattgggccaaatcggccatcacagttttcaattgtgtttggagctgcgatggctgcagcggattctctaatgctactgtgtcatttaactgacgacccgtctgaatctgagtggctaaatcaccggataatttcggcaaggataataagtacataaagaataagtgtaagaagtctagctgttgttgatcaatccccgtcgcagtatacgggttaatatcaaacccccgaaattctaaataatccacaccagtctctaacatctgatccaatgagtgactccgtaaccgcacagttccgtaaaattcgcgttccgaaattaagtcgccattagcaatcgcttggcgcattgaatcaacatatgcggcaactgaatcaaaatgaattaataattgcttattgctgtagccgaataattcactcgagcgtaaactccgtacagggtgttctggtaatttcgtcatatcttctaaaaagcctggttccgctatcggactcgcaccaaataaatacgttaaaacatagtgataacgcacgtaattttgcgcaatctggatgtacaacgcatcgctaaaatcttttagactcacatagtgatcatgatagtattcatcaaataaacgcacaattaacgtcgatgacaggctaaaattataatggatgccagagaccatctgtagacgtcgaccgtagcgcttcgtcaaatagtcacgataggcttttaccgccggtgtgtattctgaaattggaatggttaattcatcgtctggtaacaacggtggcatgctgaggggccaaatatattccgaatcggccatacttgattgcaatacttgttcgagcgctaataattgttgttggacatctacggtctgttcgaaggtatccgtaaccagttccgtttgcatctctgcaaaatcagtcgcaatgtatggatgaaacgttcgcgatcctaactcactggggtgcggttgttgactcaatgcgcccaatccggtcactcgctgcccctctttttcgaccccaaaagcaccttggttcaataaaggtgttaagcgtaattgtttaatgttctcaaataattgattaggcattttgaaacctcttcttaattcagtcttatacaactcattatacacatccctaaaaccttttaaaacgataatcactacgaatttgcgcgacatgttatactaggaacaacctaaacattaaaggatgaacgctatgcaacaacctctcgcatttcgcatgcgtccgactaacatcgatgaagttgtcggtcagacgcacttagtggggccgcaaaaaatcattcgccgaatggttgatgccaaactcctctcatcaatgattctctacggaccgcctggtactggtaaaacgagtatcgctagtgccatcgccggtagtacccagtacgcttttcgcatgctgaatgctgccactgatagtaaaaaagatttacagattgtcgctgaagaagccaaaatgagtggcaccgtgattttactcctcgatgaaattcaccgcttggataaaaccaaacaggattttctcttaccacatctagaaagtggccgcattatcttaattggtgcaactaccgaaaatccatatatcagtatcaaccctgccattcggagtcgggcccaaatttttgaagtcaagcccctcactgaagccgacattcatgtcgccattcaacgggcactgacagataaagaaaaaggcttaggtgcactagccatcaatctcgatgaaacggctgaacaataccttgcccgcgtcacaaacggtgatttacggagtgctttaaacgccctcgaactcgctgctcgttcaacaccagcgaatccagacaccaacgtcatcgacatcgatattgacgttattgaagaatgcgtgcagaaaaaagccattactcatgataaagatggcgatgcccattacgatgtcatctccgcctttcaaaaatcagtccgtggcagtgacgttgatgctgcgctccattatatgggccgtttgattgaagccggtgatttaatgtcgattagtcggcgcttgatgacaatggcctacgaagatatcggcctcgccaaccctcaagcctgtgcccgtacagtcgaggcaattgctgcggctaaacaacttggttttcccgaagcccggattccactggccgtagcagtgattgatctctgcttatctccaaaatcaaattcggccatcaccgcaattgataacgcgttagctgatattcgcgctggcaaagccggtgaagtccccgatcatctccgtgatgcccattatgcaggggctgaaaaacttggccacggtgtcgactacaaatatcctcataattatcccaacgactgggtcgcgcaagattacctaccagataagctcttaggtagtcattattacgaagcaaaagcaactggtaaatacgagcaagtcctcaaacaacagctagaacgcttgcgccaagccagtccgcataagtgaacggttacaaaagtgttgtgttaacatcacgagcgtgctattataatagtaggatttctaaggtgtgcgcgtcttcccaccttatgttgaccgatcaagtaattcgttaatgggacggatgagttattagcgagtgtagactttttcgcgaaggaaccaagtctaataataatctgacccacctgcattttctagcgggctcaactatcgggaagcatctacggcaccactagatttcccaaagtccaacgactttgaccgggctaacgtttacgttggcccttttttgttgattattttaggaggttgcacattgattcaaatcgccataatcgtttttttaatcattatcgccctacttggtgcgattttatgttactaccaagacaagaagttcctactctttgatttaactgaaaaccggcatttaggtcgattgatgtacttttcagggattgcactcatcggtgtagcgatctgcggggctttgatttactggctattgccactagtctggacattggtgacgctcgttgctgccagtttaatcgccggcttaatcggccttagctttgcaactaacctttaagatttacttttggcactgaactagcgtacaataaagatgtaaaattaaatgaggtgatgacaatgttacaacaatacaagcacattttggtcgcaatcgatggttcttatgaagctgaactcgctttccgtaaagcagttgaagttgcccttcggaataacggacaactccacttgattcacgttatcgatacccgcgccttccaaaatatctctagttttgattccgcaatggttgaacaagtcacagaaacagctaagaaaacaatggacgaatacatcgtgactgccaatgaacttggcttaaaagatgttgactatagcattgaatatggcgcaccaaagagtttaattgcccgcgaagtacccgaaaagaaaaatatcgatctcatcatgattggtgcaactggtttaaacgctgttgaacgtctcttgattggttctgtaacggaatacgttactcggaccgccgtttgcgacgtgctcgttgtgcggacagatttagataataaacacgcactcaacaagaaacgcagtagcattggtcacgaagaagcataaattagcaatcaaaaagccgggacgcttatgtcccggctttttttagtggttaaccacttattcagccaattgttgatcaacttgcacaataatctctggatgatgccggattaacgccaatgttttagcaaccgttaaatcctgtaaggcgttctctcgatgaagcgcatgttctgcacgaccaagaatgaaatacaatgcatcaagtaagtaaagactttgcttatcgattgcttcgtcaatcgcaagctgagcgtacttaatcgcaccttcataatccttcaattcaaaaagaattcccgctaagtgattataaatctgcaactcaacttggaaatcggccatagcaagtggatcagaattctccaacatttcaacggcttgttctgcataaatccgtacacgctctaaagcgcccttcatcaaataggacttgctaatgccgataatacatagaataccgtaaacatccgtctgagaaacaacgtattgattgaaggcacgattgaaaaagaaaagtgcatcgtccggtttattctccagcaataacttaatttgaccttggaaataataataccgtttgtaatcatctgctttgaccagttgatctgtgtagatctgctgaatcaaatcacgtgcttttttgaattcattggtaaataacaatgcttgcacacgactcaacaagacgtgtaattgatcatcttcttgcacaatcactgagtccaacgtaatttcaagccgcttacaaatttccaagagaatctttgtgcttggcacctgttcttttttctcaattaagctaattgttgcttgcgtacaaatccccttagctaactccgcttgagacatcccccgtgctttacggatttgttttagtttatcccctaatattctcattttaaatactccaattacatcattatttaatttaaaattaatttccggaaaatataacccaattaagtaatttacatcaattagcaatgacgctactagttgcgtttattatacactatgaactagttatgtggcattacttatttttttatccaataagtattttacactacatactaaacattaccaaacatttatctttaattaattgttaaggtgctgttcgatagtacgacaaaaaaacggcttcctgcagcggaagccgttttttataacgttgctaatattgccggaacttcttttaatgattcaatttgataatccgctgccgattgatcaatcgcgaaaagtggatcaaatggttttaatgcgatgacggttaaaccagccgccttccccgcttgaatccccagtgcagagtcttcaatcgcaaccgcctcggttggttctaaatgcattcttttaagcgcttctagatacacatctggtgctggtttattatgcgcaatctctgcaccactaacaaccgtttcaaaataaggttctaacgcggtttccaacaacatttgttgaataattccgcgctcaccagcggacgccaaaccgatttgatatgtcggtgcaacggttgctaataacggttgcgcgtctgggttcatgatatttttaaaaacgattggatgagccgctttatacgacgtatagccgtttttaattgccgctcgttccaaaacagtatggtttggaaacaactgttttaaaacggcattcatattggaaccaatttgtttacgactttcctctgccgttagtcgtgcgccaattgcattcaaaaatgctaagcgttgttcaaaatagtacggttcactatccactaaaacgccatcgacgtcaaaaataatcccttttactgtcatcttctctcaatcctatctggttaattaaaataaatctgaaatcttccgtaagtaatccgcaattttatcaggtaattcaggttgtagcaacaatgactgtaaaaagcgattgcggttataccaccgattccaaaaaccaacggtctcctgtggtgccatagtcaacaatgaacgctgccactcctgtaagacgattaaacaataatcgacatagagttgatgcttgttcattaaactgattagaacgttcgtcagatgactatcttcaccatatgcgagtgcgttatcagagaagcgatacgcctgtagcacaattgccatcatcaaaatcttatccgcacgttggatttcaggtgtttcgttaagttctgaccagacattgatgatatgcgtcatcgcatgcgcccagcctttaccatcaacgtatcctcgtgaatctaattcgatgactgtataagccattactcgccgttcaattgccaataattcggccgtacttaatacatgataaaaagtgcggttagcatataaaatcccggccaaaaacatcgcgctaaacgaacgtaaaaaaacagcgtcattttcaggttctaaaatatgcgcgaataaataatcatcttgcaataagcggcccttgacccaaatcaattgggctggggttaaaaccgtctgccgtaataatcgattgaataagtaaaaaacacctttatcgcgcacttgcgaatctgggcttgcaagatgccttaataaatcatcgagctcttcatcgctgatggtcgcttctttgcctttggttttaattcgctcatcaattgctgtgattcgttgcaagactgactcgttgtcctcaggtactacgacatgtgtccgccgcgtcttatattggacgccatccatgacgaccaatactttttccggaattgattgatagatgtcccctttaatcaatgcactacgaatcgcgtctaactgttgcatcacattttgaacttccttcatcaatcatcacccactctctactgaaaacatctcataactaactattataatgcattcggccacagacataaactatcaatccttaaacaggcccacgatatgacaaaatcgtcacctcgcttagaataaattccacctttagactgaatcaatgtaacttctagcttgatacgattaagacatcaattcacaaggagtgtcaatcatgaaaaaaatcattctattactgttctcacttggactaattgttatcggcggtccaattatcggatcagccacaactcagaatatgacggacggcaatgaccttgcccaacagtgggaccggttcaacctcttaattcccagagaagccgtctatgttaaaacagcacaccaatacgggacacaacaagcacatggcgattacctttaccggcaacctgcttaccgtgctgatggcagtcattacgaagtcgttttccaagcgccgcgcgcactaaaacctaatcactacttaaaattagatgccaaggggcgcttcgtcaattcttggactgtcgtttcaaaatctgaattgcccgttaaactgcagtctagtctataattgtaaaatacaatcgaactaaatgctgttaattgcgaaatacaaacgagggatttcgcttttttcattgcttacatttaataagtatgctatattattcgcatgcactgataaaaacgatttcacaagggagtaatgaacatgacagaattattcgatttacaacaaacacgccggacaatttatgcacttggcaaaaacgtttcaatgagcgaagctgaattatcagaattaatcttcaacaccattaaagaaacaccaactgcttttaacgcccaaggttcacgcgccattattctctttggagaagcaaatgaaacactttggaacgatattacagcaactgccttaaaaccattaacacctgcggaaaacttcccaagtacacaagctaaattggcttcattcgccgctggtgtcgggacaatcttgttctttgaagatcaagacgttgttaagaatcttcaagaaaacgtgccattatatgccgaaaacttcccaacatggtcagaacaagcttcaggcatggcacaatatgccacttggttagccctcgcagaaaaaaatgtgggcgctagcttgcaacattataacccagtaattgatgaagccgttactgcaaaatggaacattccatcaaactggaaacttcgtgcgcaaatgccatttggttcaatcgaaaatccagccgatgctaaagactacaataccgatgcaagtcgtttccaaacctacacaaactaattttaaaccgaatcgaccagagtgcgcatgcactctggttttttattttacccaacaaaaaaagcgactcgcatccgcgaaccgctttttactttaaggagaatgagagattcgaactctcgcgtgggcagaacccacctgacggttttcaagaccgttcccttcagccagacttgggtaattctccatatcaaatcttacaacgtttattataatatcaagttcgctaatcactgtcaagcctgttttttaaaaataactgctatttacacccgcccaccaactcggtatcataaaggggtgcatttaaaatcaagtaaaactacttggactggttcggaaacttcccagaataaaaaactaaggatctcaaggaggttagaaataaatgcaaactcgcaaaatcattatcgattgcgatccaggcatcgatgacacgctcgctttgaatttggccattcaatcgccagcggtggaagtcgttgcaatcaccattgtttgcggcaacgttcccgtccaaatcggcgtggacaatgcctttaagtgtcttgaacgcctcgggcagctcgacattcccgtttatgttggtgcggataaaccgctccataaaccatttgtcagtgcgcaggatacgcatggcatggatggtttaggtgacagccatatcccgcgcctatccactattcaaccggcacaacaatccgccgctgattttttagcagccacttttagtcaaccgagcgatatcagtattatcgcactcggaccattgaccaatattgcgactgcgctccagcgaaatccagatttaggtcggcactgtgcccgctttgtttcaatgggtgggacctataagagtcacggtaactgctcacccgttgctgaattcaactactggagcgatccggatgccgcactgttggtattcgaccaactcgatcaaaagattgaaatggttggcttagacgtgacccgcgaaattgtcttcacgccaacattgctggcttattgtcagcgtgtcaatcctgaagtcggcgactatctaaaagccatcacccagttttattttgattttcattggcaatatgaacacattatcggctgtgtgatcaatgatccattagcagtcgcctattttatcgatccaaccctttgtcacggctttgaaagttataccaccgtcgaaacaaccggcatcagcattggccaaacactggttgaccggttcgatttctggcaccgtcctgccaatagcctcatcttaactaaggtggacaccaatcgtttctttgaacagtttttgaccgtcgttttaaatgcacaagcaaccctcattaaaacggacttaccaaaacttagataaggaacctattatgcgaaaatttaaaacacaacacttaaccattctggcacttgccattgcactcaattacgtaggcgctaacattgccctatttttacggttaccaatctatctcgatagcgtcggcaccattttagccagcaccctattaggtcctctggcaggcgcattaactgccacttgcagtagcatcatcagcggtgtcacgaccgacttatttgcgctttattacttgccagacggtctattaaccggcttactcgctggatggttcttataccaccaccaacggacgaaacgcgagttaccccttgttgctttaggtgtcgccattcccggcacaattgtcagttcattaatcacttacttcttgttccacggtatcacctcttcagggtcaagtttaattgtacaactactaagcggcttgggactaaatcagtttgtcagcattacactggttcaagccggtacggattatctggaccggctcttggcaatcattgtggtgacacaggtttgcgtccacctcaaacaaaaaatcaagacactctaatcaattaaaaaaaagcaagtgtgcttctaacatcaattagaaacgcatttgctttttttagttttgcatcagtaacgtgacatactgttctagataatctcggtcgacctcatcgtaagcgccaacgacgcggttatcaagatccaaaacaccgattagttgattagccttgatcattggcacaacaatctcagaacgtgcagccgaatcacaagcgatataattctgatgttgcgccgtgtcttctacaattaacgttgtttgctttgcggcggcttcaccacacacccctttacctagtgcaatgtgcatacacgagacgtttccttgaaatgggcctaaaatcagctcagcatcttgatacagataataacccgcaaaaacagtctccggtaatatttgatttaataacgccgaagaatttgctagattagcaattaaattcgtttcacctgccagcaaagcagcttgttgttttaagagcatttcgtaagcctcgactttagcttcttttgatttaaacatcacaatcacttcctcttttcaagctattatagtggaagcttgctgcgttagcaattcaaaacatcccttaatttcgacattaaaaaaaccgcacatcggcggtttttttaatgaaaaattgttttatttcttcgataaactgtctctggttcgccctcttcatgattgacgtaccgcgcaatcgcgtacaaataatcagagagccgattcaagaaagttaatacagcttcgttaatcggttctacttcctgcaaggcgacgacttggcgttcaacacgccgcgcaattgtccgacaatattgtagtttcgctgctgatggtactcccccaggtaaaataaattcttttaaagcaggtggaacatctgcatactgatcaatcttagcttctaaccatttcgtgtatgcgttgtctgtccgatacccccgcgaatcatccggcgtcgctaaatctgtcccacagtcaaacagaatttgttgaatctcaaccaattccattctcaatgccggataatcaggtaaatcactgatgacgacacctaagtatgaatttaactcatcaacacccccgtatgcttccacacgaattgcgtttttgcgcactttttgaccgccgataattctggttaatcccttgtcaccggtctttgtatatagtttcaatccgtagcctcctaaaactgtcatccattatcaattttagtgtaccacgtttgaaagcgaatttttggcgttgcttaatttttaacacttgtctgcttgtatcaatttaagtaatgcctcaattcgacggtacgaaacatcacatgtatcgccatttgtaaatatcacttgatgcgtctccttatcaatccgtacgactttgtccggattcactaggatactcttatgggctctgaaaaattgtggcaattgcgcttgaatcgtcacgattttccctacaaattcacttaaccgatgatcactgtgtaagaagacgtgccgtgctttatacgctgtttcgaaataattaatctcttgaattgccactttttcaaacgataatccatcatcatattcaaaatgagctggttcttcagctaatggcacctgttgttgtcgtaacttaatggcatcgttaatggttgcttgaatatctgcacgaacctgtgctaacccgcgatccttcaaaataaaattcaaaacattaattcggcgttgaatggtttccattaaaagttcgtcatgtgttgaaacgaacacaatctgtgcatatggatccaattcacgaattttaagcgccaattccatcccatccagcacgtcattctctaaatcaatatcaagaaagtaaacgcccccttgcgtttgactttcttgtaaaaaaattaataggtcatagccattcttagtcttcaaacgcacctgagcatccaatatattttgttgaatatatgccgttataatctcttcataactatctagtaaaacctgtttatcatcacataaaaaaatatcaaccatgggtctcctcctgttcaacaacaagcattgcaacgaaatagtctccatcttgttttaacattaagctaaaatctgagcgcatatccgtgatttctttagcagttgtgagcccaagcccgcgattaatccccttcgttgaataaccagcctgataaagctgaccaaattctactggtgtattaatcgtatttttgacacaatagaccatcttacccttttgctcgaataaactgacactgattgaaccatctttaatatcatttaccacgtcaattgcattatccaaaaagattcccagaatccgtaattcatcaaaatactgttgttgcttaaataaatccggttgaacctctaaattaaagggaatccgattattatgtgcttcaatatacttgctaaaaataatgcctttaatataagcattattaatctcttgaaaccgtccaattgcctgatcttgaatcgtgtcaaagttataatgcgttagtaaatcatgaaaatcctgcattaaaactgggctcccttgttcattgataattgtctctaaagccaataaagcattggcgatatcgtggcgaaacttgcgtatttcacggtagttacgctctaactgttcaacatacagcgttagatttcgctgactttcttgttctacgttgattctattttggcgaatcacagctttcgtatacaaaagcattcccacaatcaccaaaactaatagtaatagcacaagtcctaacacaaggtacaaatattcaaccggcagattcgcatgcttaaagctatcaaaaagcaccatcactgccaccacaaataacgcgagaccggctaaaatcgtgccggccacgcacataccgtatgaagcaatggatactttaataagctgatctaaccgttggacaattaatcctaatccggctgcaatcaataattgactcaacataattaaacacaccatttgccaattaaactggctactcatcagattatcaaggccctttaagtgagtatacccaattaaccccaccgttgtcagaaccgatgatagcatcacgatgatgtaactaaagatggttgcgataattaacgcataacttgtctttaatttacgcagatttttaaagccatttaaccaaccatataatccaacagttgccaaaatcagccatagctcttcaagaaaatttccaattaataaatccattccctgaacaaaagcaatgccgactccaactgataatagtagttgaaatctgttcgttcgtttcaacttccccgtcaaaaataatactaatagtagaaacgaactaaacgtacttagattaatgacaatctgcattgccagcggcattttcattgccatgcataaaactccctactcgaaccttaattccaaaaccagaaaattaaattttgaatgttactcatcattatcatacccctcctttcatattatgaatacccatgattggtgactcatttcgattttatcacgtaatttttttaaaaggattaaatgtcataaacgtatacttgtctgcattaaacgtatataattaatcataaatatagataaataattactatttggaggctaaaaatgtttttaggccaattgatccatcaacagcgactcaacaagcaactgacacagtctgaattagcagcggggatttgcacgcaaaatacaatcagcaaaattgaaaagaaaaatctgccccccacaatcccaattctaattaagatttgtacacggcttggattgacattaaatgaacttttcaccgaatttaacgcgctcgacactgccagtgacgaaggcgtgatttctgcggaagttgctttattagcaggcgattctggccctgctgccgcattaattaccgatatcgacttcaaggcaaccgaacatccttatcccgccatcttcttctttttcaatggctatttaagttaccttgaccatcaatctgaattacagattttttccgcttataactcgttcacagcggccatcggtgacgacacttcaacgttgaagttacttctaaataccggtatgggtttaatttaccaagaagctggcgaggaattagctgatttttatttcaataataatatcaatttcatcaaccaacttgatcacatcaatgtcattgatgttcaacgcgtcctatttgcttcgcgtcacacagcagcctatatgattaaccaacaccgcattgatgcagctatcgagtttttgacgaaagccctcaaactgagtcaaaaaaatcaaatcatcaaacaagtcgatcatttgtattacctccgtgctcgggcgcgccaacaaagcggtcgagactatgcagaagatcgcgaaaccgcgttagtttttgccaaataccttaaaaataacgcgttaatcgctaaaattaaagcgttaaactaaaaaacactatccgattggatagtgtttttttaactaattggttgaacgcgactggcaatcatcaccactaagcaactcttgatcatttcaatcggaaaatacggcacaaaaccggtcattaagccggtcactacggataattttaatgaccagattagccagagtgtgccaaatccgagttgaataatgcttgctagcacattgccgccgagaagtacgcggttcgattgtccaaatagttgctgactatagtgaacaattgccacataagcgataaagcctatcaggtagccgcctgttggtccgaccagcactgcagtcccactggcataatttgcaaagaccggtaagccaagcatgcctaacatgagatagctcccgatgaccagtcgacttaagcgccatggtaacgtggtgccaattacaccgactgcgagcgtttggagtgttactggaaccagcgaaatcggtagactgacttgagcgctaaccattaataacgccaagcacatttcgactaagctaacttttctggcaaccgatagtgtcatttaaatcagctcctccttaaaatcaatcttttggccgactgccacttgcgagtcatcgctcaaaattaacgtaccatccgctagaagctgtgtaatgacaagcccattttgcagacgtcggccaataatcgccgaccagttgcagtaatgagcaacaatcgcctcgtccgcttgggccaatccggccgctagtcgattaagatacgtggcacaaaattgattgatgttcacttggtgggcgtttacggcttggcttacatccattatgaaactgccgctgccgtcctttttgaatatgtgcatgctttctacaataggaagagaattcatagttcactgggctaccagacccccttacaagttgaaattgcaacacttacgagccaaatggccgcctgatttaatgctttccagggttcaaataagttattaatcgcgattaatgatttatttgagctgtggaaggtaaacgcggttctgaatgtctcttaaaatctgtctcaaatattgacttcaatccatatctcctataatttttattttatcataccatttaatactgcatactagttaaatctctctaaaaatttctatccaaatggtgttacttttggtgttactttctacatgcacaaacaaaaaaagccagaaacgccttcaaataagcatttctagcttatgcaattcaattaccccacactgccttccatttcataactaatcaatcgattcaattccaccgcgtattccattgggagttccttggtgaatggttcgacgaagcccatgatgatcatttcggttgctttggcttccgagatgccacggctcatcagataatagagttgttcttcagaaattttagagactttggcttcatgttccattgagacgttgccgtttagaattgtgttgtacggaatcgtatcagagctggagcggtcatccataataatcgtatcgcattcgacatgggcaaacgaaccgtcactgtcgcgttcaaaacgaacagtcccgcggtaatcaacggccccgccatctttggcaatcgattttgaaacgattgaggatgacgtattcggtgcagcgtgaatcatccgcgcgccactgtcttgatcaacgccttcgccggcgacggcgattgagagcatggttccgcgggcaccttcaccatcgaggtagacacttgggtatttcatggtcatcttcgaaccgagattcccgtcgacccattccattgtcgcattttccatggcttgggcccgtttagtttccaagctataaacgttctttgaccagttttgaatggtcgtataacggcaatagccatcccgtttcacaaagacttcaacgaccgctgcgtgcaagctatcacttgaatagcttggtgcagtacagccttcaacgtagttcacgctggcgccttcatcgacaataatcaatgtccgttcgaattgacctgaattttcggcgttaatccggaagtacgattggattggaatatccgtccgcacgccttttggaacgtagatgaacgtgccacctgaccaaacggccgagttaagcgctgagaatttattatcagttggtttgaccaacgtactgaagtattccttcacaatttcagggtattcgcgtaaaccggtatccatatcggtaaaaatgatcccaagtttttcgaattcttcacgcatgttgtgataaaccacttctgattcatattgcgcactggaacctgctaaatacttacgttcggcttcaggcacacctaagcgatcaaacgtttctttgattttgtcgggaacatcttcccaatcgcggtattgcttgtccgttgccttttgataatacaacatgtgttctaaatcaagatcggataagtccggtccgaaatctggcattggcattttttcataagcgtgaaatgattttaagcggaaatctaacatccattgtggttcctttttctcacgcgagatggcgcgcacaacgtcttccgttaaaccgcgcccagttgaaaagacgggctctacatcgtcgctaaagccgtagtcgtactcttcaaattggggcatcgttgtctcttctgtcattcgttagtttcctccgtttctgcgtggttcatcatttgaccggttgttgcacgtcggtcatcgctatttaaggctttgtggagcgccttccaagctaaagtcgcgcatttaatccgcgcagggaattgttgcaccccttgtaaaatcgcggcatcttctaacaatgaccagtcttcgtcacgatcaccaatcatcatatccgaaaagcgttcgatcatcgcctccgcttgcgccggtgtcttatgcatcacggcatcggtcatcatgctggcagaagcctggctaatcgtacagccttcccctgaaaaagcaatctgactaatctgcccgtcttcgagcaccagttcaagttgtaacacatcgccacaggtggggttgcgtaattcaatttcatgatcggcagtcgtcaagtgaccatgatgatgcggatgttgcgaatggtcaagaatgacctgccgatataagttatctaatttagagagtgccattttggaaaaactcctttgctgcttgaatggcggtcacgaacgttttcacgtccgcttcggtattgtagaggtaaaaactagcgcgcgcggttgcggcaacgttcaaccattgcatcaacggttgtgcgcagtgatgaccagcacgtacggcaacgccttccatatcgagagcggtcgctaaatcatgtggatgtaaattgtcgagattaaaggcaatcacaccggtgcgttgggcggcatcttgtgggccataaatcgtgaggccgtcgattgcttggagctgcggtaaagccattgtgactagcgcttgttcatgggcttggatatgatccatcccaatttgcgttaaataatcaatggcggcccctaagccaattgcccccgcaatgtttggcgttccaccttcaagacgccacggtaattctttaaacgttgaagattgtaagcccacaaagtcgatcatctcgccgccgtattccacgggtggcatctgttcaagtaatgcttgcttgccataaagcacaccaatgccggttggtccaagcatcttatgccctgaaaaggcgtaaaagtccgcatcaagtgcctgcacatcaaccatcatgtgcggcacggcttgtgccccatcgaccaccatgtaaccgccttgtgcatggactaaagccgcaattgttttaatcggattgacaaccccaagtacgttggaagcatgcgccaaactaacaattttcgtcttaggcccaatcacctggcgtgctgactctaaatcgagttgcccatccggtaataagtcgatgtaacgcaatttcgcgcccgttttctgcgccagttgttgccacggcacgagattactatgatgttccatcacactaatcacgatttcatcgccggcttcaaccacggttggaccgaaactgcctgcaacccagttcaaactttgcgtcgtcccttttgtgaaaatcacttcggcactcgcagcggcatggatgaaggtttggaccttcgtgcgcgcggcttcatactgggcggttgctcgttcagctaaagtatgcacaccacgatgcacgttcgcattgtcattttggtaataagccaccaaccggtcaatcacggcttgtggtttttgggtggtcgccgcattgtctaaataaacaagtggttcatcattgacgatttggtctaaaatcggaaagtcgcaccgataatcatttaactggttgaccatcgattaacttcctttcaatcgtgtccgttaattgttggcgcacgtttttatccggaatttcacttagaacagcgcctaagaaaccacgaattacaagtcgttgcgcgacttcttttgaaagaccgcgactcattaaataatacatttgttgttcatcaacgcgcccgacactggcagcatggccagcttgcacgtcattttcatcaattaataagagtgggttcgcatccccgcgtgctgtccgcgataacatcaagacgcgattttcttgttgggcatcggcacccttagccccttttaaaatatgcccgatcccgttaaacgttagcgtcgcatcttctaaaatgacgccatgttgcaagatgtgcccaattgaacgcggtccaatattcgtcacacgcgtatcaatcccttgaatctgtttaccagttgagatggcgaccactttcgtttcagcatgtgatccagcacccactaaatcagaatcaaagtcaccgatgatattgccatcattcattgatcccaatgcccaatcaatccgcgcatcgcgcatcaagtggccccggcgattcaagtaagtcgtcacggattttccaaaggcatcaaccgctgaaaaatgaacgtgactgttatctttagcaatcacttccacgacaacatttgctaagttcttgtggtcacccgctgtttggagattttcaagataactaaattcactgttttgttcggctactacgaggacgtgatgaataaaatcagcgggttgagtgctgtcctgtacataataagccgtaatgggttgcttaatcaccacatttttcggcacatacaagaagagcccactgttcatcaaagctgtgtgaaaagccgttaagcgatcctcgttcggtttcactgtgacttgcatgtagtattgttgtaccaaatcaggatgttcttgtaacgcggtgaaaatgtcggtaaaaatgacaccttgttctgccaattctgccggtaaatttaacttggcagttgtctgaccaatctgtactgcgtacggttgatcagctgaaagattcgctgccgcagatggcattaaactcaaatcggatttaacggctgttggcgcatttgctgccatcactggccaatgtttatagttaattttttcaaagataggcagttcgagttgctcaatttgcgcaaacgctgcttgacgcatttcagcaaaccaggccggttcttgatgcaattgtgagaatgacgcgatttgttcaggcgtgatggctaatgttttcttcatcagaatcgccccctatttactttcgtcgtcagtcagtttgatatccaagcctaattcgtcacgaatcccgacataaccttcgtcttccaaacgttttgcaagtgacgcatcaccagtcgtgacgattttgccacccatcatgatgtgcacataatctggcacgatgtagtttaagagccgttgataatgtgtgatgattaatgagccaaaatcagccccgcgcatttcgttcacaccttttgaaacgacttgcaaggcatcaatatcaagtccggaatcaatttcgtctaggatggcgaatttgggttcaatcatcatcaattgcagaatttcattccgtttcttttcacccccagaaaatccttcgtttaagtaacgttctgacatttcttccgtcatatccaagaatgccatccgttgatctaattttttcaagaaagccatcactgaaatctgatcatcttcagcccgacgtgcattaatcgccgcacgcatgaattcagcgttcgttaccccttgaatttcagcaggatattgcatcgccaaaaataaccccgcacgggcgcgttcatcaaccggcatttctaaaatattttggccatctagtttgatctgaccttgtagtacctcatacttgggattgcccataatcgtttccgaaagcgtcgacttcccagtcccgttaggtcccatgatcgcgtgaatttcacccgtgttcatttccaggttaacaccttttaaaatttccttaccgtcgatgccgacgtgcaaatcgataatctctaatttagacatagatgaccctccaagaatcgcattctagcaattattatacgctcttaattctatgctaattgagaactgttttcaatgcttgaatgcatgaaaaaagaccacgcggacaacgtgatctttttcaatagattcgcacgggaaataggttaatattactcattgatttgatactcttctaaaaccgttgagccatttggtcagccacaataccggttgaactactcattgatttgatactcttctaaaacattaattggcattggagtttaaaggagtatgttgaactactcattgatttgatactcttctaaaacttgagcgtcaatcaaaacaacccgttatttgttgaactactcattgatttgatactcttctaaaacaaccatgtgttagattgaaaatgaatccttgttgaactactcattgatttgatactcttctaaaactgtttgtaattttaaccatgtccattatttgttgaactactcattgatttgatactcttctaaaacgctgttgctttggcgtcgtcaatatcataggttgaactactcattgatttgatactcttctaaaacccacctttttaagtttaaacgcttgctggtgttgaactactcattgatttgatactcttctaaaactatatttataataccatgtggcttttggctgttgaactactcattgatttgatactcttctaaaacgaggcaaagcatcatgtccattgggataatgttgaactactcattgatttgatactcttctaaaactgtctccgctatctttccaattaattacaggttgaactactcattgatttgatactcttctaaaacctgggtaacgtttaagaatctccttaaccggttgaactactcattgatttgatactcttctaaaacagatgttacaacccacttatttccaattttgttgaactactcattgatttgatactcttctaaaaccgttgttttttcatcagaatttcattttattcatagcgccattcgacataatcattatcgatgtgataataacaacatttctggtactgatcagatttaacctcttctgaaaattcaatgagaaagagtttcacattcaatgtcgccaccaacctcaccaattcattaaattggttgatactgagatagtgcgaaacattgatcaacgtgattatttttgattcatttaactctactgctgtctgtactatactctcaattataccatatgggtcatgttggacgacagtcgaaaattgtaaattatagaacttaatcattctttgaagatcccattcctgattgacatctaaggtcaattcatacataaaggccgcatccaaaatcgttgaacgaatctcactatctaactgagttaatttctggcgctgctgatccgttaagtcggcggcgaattttttaatcaaccgattttgaaatagatgattcaaattaattgctgccacatccccaccccaaataacagcctttgaataatccattaattcgtattgatcattgctaaatttaacggtctcttgtgcgccggacattccaataatgagtttggtatacacttctggactacttgtactgcaaaccgttattttcttattctgaacgctaaaggggtggtatggataaaaagtaatgttcatagaattaacgtcctctcagcagaattacggacgtcatcactcgattcgcccactaagaaatgcattttattatattgttgctcagtaaccatcaacgtttgtactaagcctgcaggcggagtaaagccagcaattcggttctcgataaactgcgccgattatttgctgacacaaactcgaacataaacagaatattgaatcattaaaaaaccttcgttaagcagcgcttttctaaaatgacggtatgccttgcgatcctcgctcgtttcaactggtaaatcaaacatgactaataagcgcattattcggtacctcgtgagtcattaccacctttacttcaaactcttctttcggagttgtcatgaatttcaaacaattctgtacgtgtttagtgagtgcgtttctaagaattgtgatctgtccattatattctagctcaagattcagtaactccactaaaccaaatttaacatcaggggttaattcattaaacttttgatgtgccacccaataatcaatcactggtcgaaaaggttccattagatcggaacccaaattaaaatcactgacgccattgtgatgatgaatgccaaactgtgttaaatagccattacaaacaatttcgcgattaacggctgataacaacaaactataaccataattaagggctgcattaatgggactgtactccgttcgaacaaagtctttatcaaaaactaactgaaaatacttgcgcgcaatcacggcttctcgatttgttcgatcagcaaataccattgcatcagcttctgttgttaagtcttcaatatcctttcctaacaattgtgcacattgaatttgcatcgctattttggcttgaataatcgccgtccataaggtttctttcaaccccgttccccattcaacctgttgctggatcgacgcgagactacgatttcctggataatccgcaattgtttcgcaagttggattaccgtctttgcctgtaaaaataatcttagcgccagcttcactcaactcagtaatcgccgatgccgttaaaacggcctgggtagtcgcaactaacaaaatttggatatcatcaattggtacttggtgtgttgcatcttttgtctggacaataatcttccgtccagaataagaaacctttgcatgttgtgaaatcacaactgttcgccaactcataaaaatttaccccctacatccttgttttcaaaatgatgacatgctataatgctgttgttgagcttgatacactcaatcgaaatactcattgatttgatactctgagttaaaatcaaacaaggtcttcggaccaagttttctattctgagcctcttatgaggcctttttttatgccttcaaaccaaaaagctagcccatcattacactaatgacaggctagctttatttatttataaatcccttaaagctactcgtcgttcgaataaaccggttggagattgatagataatttgggtatcaggtgaaagagaaatccctgatggttgctgcatttgacctagtggcgtacttattttcaacacccctaagtcgataactgccgcatttgcatgcaatccaattagaactctatccaatataacttgttgcccaacctgcaccatcttattaccatcccattgactcttccacggtaacttcataaaggctgctttacccgcagataatttagctctgaattgattagtatcatacagtggaaaatagtgcatcacttgatctaagatttcatcataaacttgttcagcgagttcttcagactgtgttaaaggtagcgcgccatttaataatttaacagccgttttatcgagaatcagttcctgctcgttgtgtttatacgtcgcagagcccaatgtcaattcttgaccattatcgaagaaacgttgattgattaggatatgtggtgcaatgacttcaaagtcttcgaccactttcacaatcgttcctttttgttttttcacttttgtaaattgcggactaattttttgctttaagaatgccttttgtgagtcttcatccgtcagttgtttaagttgcgctaaccaacttgtctcaacaccacagactttatagagatcaccctttttatttttaatgcgtacaatacacatgtaggcaacggtcttccctgagtacccaccatagagtgcagttggtcgatcttgtttagcgggaatcaattgcttgccgccctgcccacttgctttatcatctttagccgcatagagcgtttgattaaatagcgctcccgaattttcatgcacttcgcgagtcactagaatcttcttaaactgatatattttattcaaataagctagaccggattctttatcccaaataaccgcttcagtattttcatcaaccaattcgtctttctttagaccatttaaaaaattaaagttacgccacttatcttgctgacttgccttctgatactcaccgtatacaaaataaggttttaatttaggatagcgcttcaatagatacagaccaacgaatgcggtcagataagcatcgaatgcatgatgatggttatttagattacgattcttcggaaaatcgaattctgttcgcatttgatgggttaacccactcttaaccgtaattaactcaatattgtcttcaccatattgttccatcaatagatttgtcgctaacttaatgacttggcgtgtttctactaattgccgattaataaagcccttcatggcgtatttactgatatgatcaggatttaacgttaagttatcgtatttcttcttagtaattaacccagcacgcaacatttgttcccactgaagctgcatcttcttaccaagttcaacgcttgtaaagtcggtcggtacttgatctgctttgctacggttcattttttgagaaactaaaactcggttatctaacgaattatccttcacaaacgactgtggcaagatatgatcaatatcgtacgtcgataaacgatcaatattcaacgaatcacccgtatacatatcccgaccaccctgcatgaagtacaagaataagcgcgtattgctcaatgcagaattcgataaatccttaagttcatttctgatttcagtattatttagcaattcattgctgatattttgatagacttgttcaacttggcgcttacgttgcaccgaaagtcgtggattcacttcatcttcgcgcgcaaattcaatcaatatccgttctggcgcctggcctttcatggccttttgaatgtcattgacaacaagcagaatctggcggagcgcttttttattctgtggtgacgtatataaatcattgataacatcttgtacatcattttcagctagcatcatttgattagcttcagtaattaatttatcaaagtcttcagagtgcacaatccgcatgaagttatccgttgtatcccagagtaagtccataattcgttgtccattcgcattgacgatttgcgttaataatttagccgacaaacgaccccaaccgcggtagcgtttagcagctaattgcacacgttgctgatccgttaaccaatcgatttcattcaatttggcgctatatattttgccgtcttcaaaaatcgttgaccattcaatacatttttccaaatcggcttgtttatcaacatcatcaaccgcatctccaacaatcttctttaagtcatgatacgtgcttaatcgactattaaatttgttctcatcggatagaccagtaattgcgggacgacttgcatagcgcttttctgataccaagtaatcctgaatatttttcactgttacacttattttttgcataaataaatccgtaaatattgcttgtttcaactccgtcgtaatcggttggtcatcaatcttaagtccgtttaattcattcaacacttcaaaccgttgataaattaagctctgtttagggagtacatcttcagccaataaataagtatcagtcgttgtcatgcgcttaatgaattcattagcggatgcttgacggtccactttatcatcgaagttccacggtgtaatccggccttctgctttacgaatcagccacgcaaatttcgcatcggagctttgtcgttgctgctcagccgtaatcaggggccccacatagtatggtactctaaaggccactaattcgtccaatttatatttagcgactgtttgccgtttagaattgggattaagttccgctaaccagggatagtattgttgttggttctcaataatccggtctaattcctgttgatgtagttgatgcggaattgccccattatctttggtccgttgttttggcataaattgatcaagttcaattaattttttaatttcactcacaatcggatgatctgggttgttctttaaggcttttgtgatatctccgtaaaaatcttccttcgaataggccttcgtattttcttgaccatcaacatattggtcataagcctgctttaatctctgtcggtctccaggtgctaacgcttcccgtaccgcttttagcatttttaaatgcttttgatgatcgtcatacttcgtgatcatcgcttgcgacaatgattgattttcgggaacgattcccgccaatagaacaccagaataaagttcctgtaggctttcgataatttgatgggcattatcatcaagactactctctaacttgaccatttcttcatcaaagttttctgcattaaaagtgagtgtccatgctttaacatcttcggcttcgatcccagtaagcacattaaacttcgcttttaaccccaagattgcttttaataattctgtcgcaatcgccttattctgcttttcaactgccttattcgtacttggcgtataaatcagtgataatgcttgtctttgccgattgctagcactttgttgattatccaataagagcgctttgacctccgccaatttatccgtctctagttgaaagccagattcactgaacaagtcagcaaaaatcgtgtttagtctgtcaaaatgagccactaaattaatttcgctactcttaaaggatgagacgggcgcttcatttaaaaagtgcccgcgatacttcacaatatgatgcatcgctaaataaatctcgcgaatatcaaattgacgtttctcggtcattagcctatatcttaaatggtaaatcgttggataatcgtcatagaatgcccgatctgttcgatcattaaataaacttgtctgtggatgtaactttcgctgatccttcggacttaggtttgattgtttttgccgcaagaaaaagtatcatcaaccggcgtgatatagggttcaaagatttctcttaacaatcctaaccgccatttacgtcgttttaatcggcgacgtgttgttctaaagctgcgccgttctgcggctgtttgtccttcatcgtataaacgaaccccataaccatatttacctcttacactgaccaacttactttggtcatcaaccactgaccacccaattgaactagtaccaatatctaaaccaatattatacggacgactcattcttactccccctaaaagtttatattcaatgatagtatatccaatttaacccgctttttccaattaaattaagaattacacatgctaacagcaaaaaaagacaagtcttaatgacttgtctttgatcattattcaactggtaacactgcgccgtgccatttattcttaatccattcttgcgttgattttgatttgagcgctttaacgagcttcttgatagctgggttattgcggtcttttttatttgtcacaacaatgttggcaaatggcgaagattgcttttcaagggccacagcatccttttcagggttgagaccggcttgcacagcatagttcgagttaatcgccactaaggtgccttcatcattcttcaaaagttcaggcatgagttttggttcgaatgtgtactcaaacttgaggtgtttgggattgctagcgatgtctttaaacgttgcgttttcagcatttacgcccgatttcaaggtgattaagccaccgtcttttaaaattgttaaaacacggccccagtctggctggctgcttgaaactaatactttcgcacctgatttcacatcactcaattttttaacttgtttactgtataagccgagcggttctaagtgaatactgccaacactgactaagtcgtagccgttatctttattggccttcttcaaaaagggtttgtgttggtagtagttcgcatctaattcgccactcgctaaagctttattgggtaaaacataatcgctgaagacttttactttgaggttgatgccttcttttttcaactccggttgaacgtgtttcaaaatcgcggcgtgtggaattgcggatgccccaacgacgattgtgttgctgtctgacttcgcttctttgttaccacaagcggcaagtgcgcccgctaataagaagactgctgctaataatcctaaactgtgttttttcatgaaaactcctccttttaaattaacgatgatcaatgtgttgaacaaccaagtcgcccgttttttgacaaatgaagacgatgattaaaataatgacggttgcgactaacgtaatcgcattttggttagcttggaacccatcttggtaagcaagatttcccagtccaccggcaccaatcacccccgccattgcggtataaccaacaagtgaaattgcggtgacggttaagccggaaacaagcgccggcatgctttctggtaaaaggacttgccagacgatttggacttttgaagcgcccattgaacgggtggcttcaagcacaccgccatcgacttcccgaaaagctaattcaacgagtcgtgcataaaagggcgcggctgagatgattaacgctggaatcgcagctttcgggccaatcatcgtgcccatcaagccttttgtcaatggaatcaacaagacgattaaaatgatgaatggaatggaacgaaagacgttcactaataaagccacaatgccattcaacagccgattcactcgaccaccactcgcgtttgtttgataaagaactaacccgagtgcgaatccaagaactgccaccaataaaacactgacaattgttaaccaaactgtttcaaaagttgcttgccacatacttggccagttcacttgcttaaattgaaaataggattgaaatccgtttacgttatccatgacgtaccacctcaacttcgattgtttgttgtgctaattctgcaaggactgcctttaaatcacttggattagcttgaatttgaatgtataaatagccaagtgcgccattaatggtttgttgtaaactcccactgatgacactgatttcgactgctgggtattgacgcatcaagcgaccgatcaccggttgactcgattgttcttcgttaaatcgcagttggacgattgtgccatttggaacccgttctaacagttgatcaatcgaagcggccgtttcacttggcgacaccactaaggattcagcaacaaatgccttggttgcagccatttgtggtttttcaaagatttcgtgcacagtcccttcttcgattaaccgcccattttccatgaccgcaattcgttggcaaatccgccgcaccgcatccatttcatgggtgacaagaacgattgtaatccccatttcacgattaatcttagccagtaacgttaagattgaattcgttgttttcggatcaagggcgctagtcgcttcatcacataacagaatcttcgggtcactaatcaaggctcgtgcaattgcgacccgttgtttctgaccgcccgatagttcgcttggataggccgcttctaaatgggtcaattcaacaatctttaataatgcgcgggctttgatttgtcgttctgccttaggtaccccggctaattttagtggcaacatgatgttttctaacactgtctttgaccagagtaagttaaagtgttggaaaatcatgccaattttctgccgaatcggccgcattgcttgttcgctcaaccccacaattgactggccctcaacgagcacatccccagtcgttggcttttcaagtccattcaagagtcggatcaacgtactcttaccagcgccggaataaccgataatcccgtagattttgcccgcttcaatgttcaacgagacatccgttagtgcggcgaatgttttttgttctcgctcaaaggttttacccacttgttttaatgtcaacatactaatcgctccctcttcttttaaaaaatgccaaaaaaaaaatccttcctctcaaataaatgagagaaaggacgctaaatgcgtgttaccaccttaatttacgattacctcacagtaatcgccttacaaagtacccgattgatactcgttcgctatatcgggcaacccccgcattcggctcagttaaaccttaccaaatgaattgctcaaagaccatattcatctagctttcacattatccgcttgcacctgaccggactctcttaaaatgctactgactaaattactcatcttttcatcgcttgtattaagtagtacctatcataattaaagttcaattaaaagtcaagcaagactattcaaaaaaatcagattattgtttaagtaatggcctaatcgacccgaatgtcagcaatccacgcatctttttcgttatctgcatttaataattccggattatcagctaacggtgtgttgacgtttactaattcaccagctagtggactgtcaagatcttgtaccatcttctcagcttcaatggccactaaggtttcattagccgtcaatttttgccccacgattggaacatcaacaaacttgattaacccaaactcattttgtgcggctttggtgatcccaattcttctaatcgatgctgcaatttcctctgtccaaaaataatcattattattcatcgtcatccgtcattcactcctagaaagtatcttcagcttcactgaacatgtaactcttataatggtaccgcatcgacatgataaacccaacgccaattaggttccccaataatgacgagcccccttgtgagatgaacggcaatggaatccctgtcaatggtaataaaccaacgctcatcccaatgttttcgaaaacatggaataagatcatcatgatgaccccagttgagacatacgcgtaaaattcattcttcgtatcaaatgtgacccgaatcatttggtaaatcaacaagaagtacaaaagaatcacaaaacatgaaccgacaaagccgaagttctcaccaatgacagagaaaatcatatcggattcacgtactggcacatggacttgcacttgattgaagcctttcccaaatagctgaccagacccaatcgcttttaaactctgcgataattgtaaactggtactggcagtattatcaaaaggatgcagccaagcatcaattcgattgaattggtacgttttaaagcccagatgcgtcaagattacccggccaggggtcgtcgccgctagtgtaagggccgtgcccccaacagcgactaagacagcaatggctggggctaaaatcttccaggtcacacctgagacaagcacaatcccacctaagatggcaacgaacactaataaggtcccaaagtcattttgtaatttcaataggaccatcactggaagtgtccatagtaacattcgtccaagtaacatccaatccgtcttaaccgtgtgttctggataagccgtattgtgttgagtaacgaccctgcccaacatcaaaatatatgccggtttcatgacttcagatggttgaaatgagattggtccaagagagaaccaactctttgccccagtttgcaaggcgactgcccgattataaaagattaaaacggcaatcaagaggaaaatccctaacccataagccagtggtgcaatccgccatagttgttctgaatcaaactgcataattgcgacaatcgcaattccaccaatcacgtaccatgcagcttgcataataacggctcgagttgaactcgcacctgatgtatcatgtgacgttgccacatagattgacatcaagccaatcaacgctagcataaagactgaaaagacgattccataatcaactcgcgaggaatcttctgttgtttctacttcctttggcatgctaagtctccttcaatcaattctgctctcattatataaataacccggccagaattctgccgggttactgtaattctaattaattcttaagaattaaccttggtgtaagtggtactcccgtagtaattcgttaactgcatcgtcgtgggtcttagtaatgatactttgaccagtcccttcaacagttgcttcaaaacgtttcttagcgctatcttctacaatcacgccaatttcatttttgccgaccatgacgcttgtcatttcttggccattacgtttgatgtcatcaattgtgacagtaattttttgttctttttttgacatagttatgttgaacccctaacttctttgacttacttttgtgactcgtcttgctgtcgattgcgcaaaacggtgaaatgatctggtactggatcatagccgccccgtacaaacgggtgacaacgcaatatacgaccgatgcccatgattaaacccaaaatagcaccatgtttttggattgcttgaatcatgtaactcgaacatgttgggtaatatcggcaactcggtggtaataatggtgaaattcccttctgatagaaacggaccaatccaatcaatattttccgcaatttatctacctcactttagcgcatgctactgcaagaaattaataatatgactccatgtgctaggcaagaaaacggcaaatggattctggccgccaattgcaaaaccaatcatctgaccaactaataacgcaataattatgagcacgaaaaccaataaaattttctttaaaacgggtttgacgtgttcgtcaaaatttgattgatacacacaatcacaatccttctttaatagaatgcggcttaataagcgcgtttatgttcaatattatctaataagatgccagtccctaaagcaacagcatccaatggattttctgctaagaccaccggaaccttcaaatgttctgagaataagctagcgatattgcgtaataaagcaccgccacccgttaacatgattccccgatcaataatatctgcagataattctggtggtgtcacttctaacacttctttggcagccgcaataatttccatcattgtttcatgcaaggctgattcaacttcatctgcactaattgagacagattgtggcaacccacttaccatgtcccggccacgaatctcaagtgactcactcgcatcagcatgccaaacgttaccaattgttaacttaattgtttcagccgtatgttcgccgattaatagattatgtttcttcttaacgtatgcggcaatttcactattcatcttatcgcctgcaagacgcaatgaacgacttgtgaccacttcacccattgaaagcacagcgacgtcactggtcccaccaccgatatcaataaccatgttaccgcgtggttgaaaaatatccatgccagcacctacagccgcgacttttggttctaattccaagaagactttgccgccacctgatttttcagcagcttcaacaattgctttttgttcaattgatgtaatatttgttgggcagcaaatcaaaatattaggttttgataggaagccctttacatttaatttattaataaaatacgctaacatttcttctgtaatgtcgaaatcagcgatgaccccatcctttaatggacggacagcgtggatattgccaggtgtccggccaaccatccgatacgcttctgagccaactgctaaaacttttttggtttgggtatcaatcgcaacaactgaaggttcgtttaagacaatgccttttcccttaacgttaattaagacgttggcagttcccaagtcaatcccgatatctttagccatttggtgttgctccttccgagaactatattcagtaaatcattataccataagacaggtacctttagtatcctgatttggcaaaataaaaaagcgacgtccgctgaaatagcaggcgccgccagtctgttttatgcacgttttgcttgtttaatccggtgaccggcagcatcaaaatcagctcgactaatatgtgccccaagtgcccgtaatttttgatggaaatgatagtaaccccggtccatgtattgaaggttcgtaaccaacgtttcaccattagctactaacccagcaatgacaagtgctgcggcagctcttaaatcggttgcagccacttcagccccattgaaatgtgtatcgccataaagcacaactgattgaccttcaatttgataatccgcattcattcggcggagttcttccaaatgcatgaaacgattttcaaataccgtttcggtcataacactcgtcttcttagcaagtaattgaagtgtcgtcatttgtgcttgcatatcagttggaaagcctggataaggtagcgtcttgatattacatgcctttaattcagcgggaccaataattcgaacaccagcttcttcgtcaatcacttccgcacccatttccactaattttgataggagtggtttattgtgttcagcaatcgcttctttaatcaagacatttccttgtgttgccgcagcggctaccatgaaggttccggcttcaatccgatcttgcacgatactgtgatccgtcccgtgtaaagcggttacgccttccacccgaattgtctcagttccggcgccaaaaacgttcgcacccatcttgtttaagacattagcaagatccacaatttcaggttcacgagcaacgttttcaatcaccgttgtcccttcagccattgtcgcagccatcatgatgttttgtgtcgcaccaacactaggaaaatctaagtaaatattagttcccactaggcgttctgctttagcttcaatgtaaccatgattttgatgaatggttgcaccaagtgcttcaaaacccttcaaatgtaaatcaacaggccgcgaaccgatagcacaaccacctggcatcgcaactcgtgcgtgacctaagcgcgctaataacggccccatcacaacgatggaagcacgcatttttgaaacatattcaaaagctgcttcaaaattcaaatcaccactggcatcgattgttaattggttccgttgttcatcaaactcaactttagcatctaaactctttaatacatcttgcatcatgaagacatcagataaaataggaacgttcgttaattgaacgggtccgtcggttgctagtaaggcagccgccataattggtaatactgcgtttttggcgccttcgatttgaacttcgccaactaatcgttgaccgccttgtataatcaatttttccaagagtttccctccgaataagactgctagtttatgggactaaaaaaatcacatttttagcctgcgcgattatttctaaaaagaattggctaacggtgtagcccatcacaatagcgagaaatactatgacaatctgtacttgacggatatgattcggtttgaaaaattgctcaaaccggattgattgtaagccataaaaactgattaaaataaaaccaatatggctaataattgaaataactgcctgtaacccgattgattgcacttaaataacgccccttttgtgatatgcaaacattgtaacataccaaaataggatttgtctgcccaccagactgaatcttaagaaacaaaaaaagccttaaaccattcaggtttaaggctttttgaatcctacaataagtgattcttaacgttaatccggtttatcgcacgttgcagtgcaatttgagcccggcgtaattcgtcagtatcattatgttcggacgctgttttaattgcgttttgagcacgttccttggcactttgcgcacgcctaatatcaatatcacgcgcccgttcagcactatcggcaacgattgaagcaacgttatggctcacttccatgaacccaccattgaccgcaattgcgtcttcacgtgctggatcatcagtccgtttaacgcgaatctcaccaatttctaaaggggtaataattggctcatgattagccataataccaagttgcccggccatcgctggtacaaccaacaatgttgcgtggtgatcatagacaatcccacttggggtcacgatattaacggttaataccttttgttcttctgccatcattaacgcccctttctaagcttgtttcgttttttgttcggatggtgtataacccaattctttagcttttgctaatgcagcatcaatattcccgacaagccggaatgcttcttcagggacatcatcatagtcacccgctaagatgcctttgaagcctgccactgtatcttttactggcacgtatgagccggcttggcctgtgaaggcttcggcaacgtggaagttttgtgataagaagaattgaatccgacgagcacgcgcaacgataatcttttcatcatcagataattcatccatccctaagatcgagatgatatcttgtaattcacgataccgttgtaagacgtgttgcacttctgaagcaacttcgtaatgttcttcgccaacaatttctggatccaaagcactagaagttgattctagtgggttaacagcaggataaatcccctgttgtgttaatttacgatccaagttagttgtagcatccaaatgcgcgaaagttgttgcaggcgcaggatcagtataatcatcagcaggcacataaatggcttggattgatgtaactgaaccttttttagtagacgtgattcgttcttgcaattggcccatttctgttgccaatgttggttggtaaccaacggcagaaggcatccgtcctaataaggcagaaacttctgaaccagcttgagtgaatcggaaaatgttatcgatgaacaataacacatcttggccttcaacatcacgaaagtattcagcaattgttaaaccagtcaaggcaactcgcatacgagcgccaggtgattcattcatttgaccgaaaaccatcgctgtcttttccaaaacgcctgattctttcatttcaaagtataagtcattaccttcacgtgttcgttcaccaacaccagtaaagacagaaataccaccatgttcttcagcgatattatggattaattcttggattaaaacggttttaccaacaccggcaccaccaaacaaaccaattttcccacctcgtaaataaggggcaagtaaatcgataaccttaatccctgtttcaagaatttctgaacttgtatttaattcctcaaatttaggtgcagaacggtggatactgtcccgtctaaaatctgcaggaaattcttcgccgccatcgattgtttcaccaagaacgttaaatacccgtcctaaagtttctttaccaactggtacgttaattgcacgaccagtgtcttcaacagccatcccccgacgtaaaccgtcagttgattccattgaaatagtacgcattaccccatcacctaattcaagtgccacttctaagacgacagattcgtcgttccctttgttgacaaccaaggcattattgatatctggtaaagtcgtatctaaagaaaattcgacatcgacaacgggaccaataacttggacaacttttcccatactcatagttgttattttcctcccgcgtttcttattctaatgctgccgcaccaccgacaatttcggtgatttctgtagtaatctgtgcttgacgtgcccggttaaatttaattgataaatcagaaattaaattattagcattatcagtggcactcttcatcgccgtcatggaagcagaatgttcagctgttttagaatcaagtagtgcgccgtaaatcaaactttcagcgtattgcggtagaatggcatctaaggcatcatcaacagaaggttctgtgatgtattcttgatctttatcagtgacttctgaaacatccaagtcggtaataggtagcattttttcagctcgaaaagcagatgtcagtgagttgacatggtggttgtaacaaacgtacaactcgtcaaacacgccgctatcatacattgcaacagctgttttgatgatttcacggacttcattaaatgatggcacatcacttacaccacgatattcgtaggataagttcatttgtcgtgctttaaagaaatcagcaccagtgccaccaacggctaaaatagcatattcatcggcagacttgtggttttctgaaatcatttcaaccattgcttttaagattgagctgttataagcgccaaccaatccacgatcactcgtgatgaccaaataaccggtctttttgattggtctttccactaacaaattacttaacgtaatgtcatgccgcaatgatttctgtgaagtaccgttagtagcttctgctgctttagcggtacttttttgacgtgcacttgcaattaattgacttgcagccaaatgcgtgacgatttctcgaatcttattcgtatattgttgataagcgattgaatttttttcaatctgagaaagttttgcaccagagaccatttgcatagcactcgtaatttgcccagtttttttagtagaggcgattcttcgtttgatatccattaaagattcagccaattaattcaccccttactgtcctgagtcttgattgtcagcagtagcttcagcgccgacaaaaccttctgtgaaggatttgatagcagcatctaacttatctgtatctggcaatgcagcggtttgacggatagtgtccatcaagtcctttgcgttactttcaagataatcgctcaattgactttcatattgcatgatatcgtcaactggaacgtcatcaataaagccgtgtgttaatgcataaagaatcgttgtttgttgttcgaatggtaatggtttgtgaagtggttgtttcaaaacttcaacagtccgtttaccacgatttaatttcgcttgtgttgccgcatccaagtctgaaccgaattgcgtaaaggcttcaagttcacggtatgatgaaagatcaagacgtaatgtcccagaaaccttcttcatcgccttcgtttgcgctgcgcccccaacacgagaaacagatgacccagcatcaatcgctggacgtgttcctgaatagaataaatcactttccaagaagatctgaccatcagtgatggaaataacgttagttgggatataagctgagatgtccccagcttgtgtttcgatgattggtaaagcagtcattgaaccgccacctaattcatcacttaacttagcagcccgttccaataaacgtgaatgtaagtagaagatatcaccagggtaagcttcacggcctggaggtcttctcaaaagtaatgaaatttcacgataagcagcagcttgtttacttaaatcatcatagacgattaagacgtgcttgccgttatacatgaattcttcacccatcgctgcaccagcatatggtgcaatgtagagtaatggtgctggttgactaggaccagcttcgacaacgatggtataatccatagcgccgtaacgacgtaaggtttccacttgcgctctaacggtcgattctttttgaccgatcgcaacgtagatacaaatcatgtcttgatctttttgattaataatcgtatcaatcgcaacagatgttttaccagtcttacgatccccgataattaattcacgttgaccacgaccgattggtaccaaagcatcaatggctttcaaacctgtttgtaaaggttctgaaacagattgacgtgccataacgccaggggccttcttttcgattggacgagttttgtccgttttaatttcgcctttgccgtccacgggttgacccaatggattaacaacacgaccaattaaagcatcgccaacaggcacttccataatccggcctgttcgtttaacttggtcaccttcacgaatgttttcatattcacctaagatgataatcccaacatcgttggtttccaagttttgcgcaaccccgtatgaaccgttagaaaattctagcaattcacttgaaagggcgttttctaaaccgtgagcacgtgcaatcccatcaccaacataagtgacagtaccgacttcttcaacggctaaatcttcattataatttgcaagttgttgtttaattaatgcactgatttcctcagttttgatgctcatcaggttcacctctttatcaacgattgactatttcaatagtaatgacttaatttgatctaagccatgtttaacactgccatcgatcaccttgtgattcgattccagtacaatcccaccaataatatctggatcaacgatactttccactaagacctgattgagaccttcgcgtttagcgtagctttggctaatctttgcgatttgatcaccatctaaagcaacggctgacgttaccttagcgtgtgcaatccccatcttttgatcataaagatcttcgtaggccgcaataatgtatggcatctcagccattctttgatagtcaaaaacaaggcttaaaaagtgttgcatgagtgtactaaattcaccggaaaggctctttagaagctcacgttgtttcaatccagataaagtcgtatcagtcagaactgcacccaatcttgggttgtcattgaaaatagtctcgagtgcttgtatctcttcatggatactttcaaattgttgctcttgttctgcaagggaaaataatgcctttgcatagcgttgtccgactgcatatttatctagtttcattttgcttgtccaacccttcaatataggaattgatcaatgacttttgatcagtaactgacaattctttcttaatgagtttagaagcaatttcaatagatagttgagcaacatcatctctcgcactgtttaacgcatctaaacgagattgttcgatgtcttttttagcattttgttttaaagtttggacttcttcttgagcaagtgtgaccatgccttcgcgttgtttttcaccatttcgcttggctgtattcacaatttcaactgcttctgacttagaattcttcaactctgttgcgcgttgtgctgctaatttggcagcatcttcacgtgattgagcggcgttatctaagtcgtttgtaattttgtcagaacgagcttgcatcatttttgaaacaggtccgaacgcaaatttaccaactaaagcgactaaaataataaagacaactaatacgaaaagtgaatctccaaggtaggcttcagaagcaccaacgattaaattactaaacatctattgacactccttccttgacttactgactaatttttaaagcgaaaatttagattcactcggattaactaaataagatcaagaaagaaacgacgatagaaagaattggaacagcttcaatcaacccaacaccgataaacattgttgagcgtaattctgctgataattctggttggcgtgccatactttcgattgtttttgagataaccttaccgttaccatatgatgctgcgaatgctgctaaaccagctgcgatagctgctgctaaatagttcatgttttttcctcctaatttttagtcttccatttcaactttttctgaaatatagactatcgataatgttacaaatacatatgcttggattgccccgataaagacggagaatccttgccaaaccatttggatcggtgccgtcacaagcatcgttgctggtccatgtgagaaggccattttaactaataaacttagtaaaacttcacccgcaaaaatgttcccgtacaaacgcaaggacaacgttaagaaattggtaaattgttcgatgatattaattggtaagaaaaatcctaccggtttaatataactcttcatgtaattaccaaaccctaaccgttcaacactaaagtagtgcgcaatcactaagacgatcatcgcaagcgacatagtgataatcggattggccgttggactcttcaaccaagttacatcatgtaccttaatttgaagaatcaaaccaagttgattactgataaatacgaacatgaacatgacgaatgcaaataagtaaaattgtttaccttcttcaccgggcatcgcacttttaacgattccgttcgtaaaatcaatgatccactccaaaatattctgccgtttagtcggtttaagcgcaatttttcttgataaaaagaaaacgagtgcaaaaaccaaaactgcacttactaagaccgatagacagtttgctaaattaaaacgaattcccaaaatgctaataatgggatatttatcatccacaaaattccctcctcccttaggcttatttgttgattccactctatcaacgactacgtctacgcgagttgcacaacgaacctaaaaacagcaatatttatgtagaaaaattaagcataaatcatcaccgcaatacaagtatgataataccaccattaaattaaaagtacaaagcaaatactaactaatttctaattatttttttgtcaatgcactcaaataccataaatattatcatatcaaaagattaaacttattaacggttgcttttttggcaaaaaaaacgcgtaacacaggaaaatcaagtgttgcgcgcttttattatcggtacctaattaatggctatttagtcccgaaaagacggtcgcctgcatcccctaaaccaggaacaatgtatccatcctcgtttaaatgatcatcaagaccagctgcatagatgtcaacatctggatgggcttcttgaacagctttaacgccttcaggtgcagccactagtacaacaaggcgcattgacgttgcgccgcgttttttaagggcatcgatggccatgattgctgagccaccagttgcaagcattggatcaacgatgaatagttgtcgttgatcgatatctgttggtaatttaacaaagtattcgtggggttgtaatgttttttcgtcacggtacataccaatgtgaccaactttagcggctgggattaattctaaaacgccatcaaccatcccaagacctgcacgcagaattggcacaacggctaattttttaccgctcaattgtttttcaattgcaggccccattggtgtttcaacttctacgtcttccattgctaaatcgcgcgtgatttcataaaccattaattctgcgatttcgtttgcgacttcgcggaaaactttagtacccgtatccttattccggataatcgttaatttgtgttgaattaacggatgatttaatactgtgaattttgccatttactttgcccctattctattcaatgaatttagtccaaatttttttcgcaaaaaaagagtgactccaaagaaaaccttctccgagtcactctcccttccgcgtaaaattctgtttactattgtagcgtaaatagcatcaaaaaactagcggtattcattaattaatctaaaaatttagcttgtgtgattggaaaatgatccgtcaacgctaaaacatctgcactaatgcgcgtcatggcgtctaattgatcgtgtttttcaatcacttctaaaattaattgcgcaatcaattcacaatccgcttctttaaacccgcgcgatgtgattgctggggtcccaattcgaatcccacttgccttaaatggacttaatttttcaaaaggaatggtattcttattaacggtaatgtggacactatctaaaaatgcttggacttccttcccatttaagccactctgcgttaaatcgagtaacattaaatgattgtcagtcccgcctgaaaccacacgtactaagtcagattgttcgaaaacgccagccatcgcttgcgcattggccacaatttgttttgtatatgctgtaaattcaggttgtaaatcttcaccaaatgcaacagctttcgccgcaatgacatgttcgagcggtccaccttgaataccagggaagatggcagagtcaattgctttggcatattctgctttacacaaaatcattccaccacgaggtccacgcaacgttttatgcgttgttgtggtcaccacatcggcatatggcactggacttggatgaacaccagttgccactaaaccagcaatgtgtgccatatcgaccattaaataggcaccgacatgatcggcaatggcgcgtaatcttgggaagtcaattgtccgactgtatgctgatgcccctgcaacaatcattttaggatgaatttcatccgctttagcagcgagcgcatcataatcgattcgttcgttatcgtcagcaacgccataactatagaagtgataaagttgcccactgaagttaaacggtgacccatgggttaaatgaccgccatctgtgaggttcatccctaaaatcttatcaccgggttctaaaagcgcttggtaaactgccatattagcctgcgaaccggagtgcggttgtacattggcatgttctgcattaaaaagttgtttagcacgttcaatcgcgagtgattcaatttgatcgataaattcacaaccaccgtaaaaccgtttgcccggataaccctcggcatatttattggttaatacgctaccttgtgcttcttgaacagctccggaaacaatgttttcagaagcaattagttcaatattatgcacctggcgttgttcctcttttttaatcaattcgtaaatttctggatcagtttgttcaatcatttacaatcactcctcttcctattaaaatagtgcctatttcgaagtaaagtattgttggccggcagacttctcgaggcgattcatatacgctaatccgacaccctcttttgcgaagccttgcactaatataattttaacctcaggattcaaatcaaaataccgtaatccttcaaacaagtgttgactagcagtcactacagaatcacctaaagagaactgatctttaaacctaacgtcagataactgccctaacaccgtatcaaccgccataacaccaaatggcacactttgttgactggcccatttaaccgccgccggaaattcatctggcgttggcactatgtaaacctgtgcatttggagcatagtgtttgtatttcatgcctggtgcctttggcgtttcagctgcgccaactttatggtggtttgtcataatcggcccaatcacacgttcaatggcttcttgagtcacaacaccgggtcgtaaaataacgggtgtcgcaacacttaaatcaatcaccgttgattccaacccaacaccagttggaccatcatcaatgacaccggcaatctttccatttagatcatgtaaaacgtgatcggcagtggttggactgggcttgcctgatgtattggctgaaggccccacaagtgggacaccggccgccttaatcaagtctaacgtcaccgcattgttcggcattctaaaggcagcggtctttaaaccacccgtcacaactgaatctagtgccgcatgttttagcggcaaaataattgtcaatgaaccgggccaaaaagcgtcgactaattgcttaaatcgatcactaactccggctgcgtaatgctcaaccgtcgcaacacttgctacatgcacgattagcggattatcacttgggcgccccttagcggcataaactttcttaaccgcttcaggattcgtcgcatctgccccaagaccatagacggtctcagttggaaatgaaatcaattcgcccgcttttaaatctgctgctgcttgttcaatctgttctactgtgtatctcttggtttccattataggccttccttactctacttctgatttacatcataccaaattccgattgaaatcgtaacccacacgggccattctagaccaattagccatatcttttttgattgtaaccgctacatcggtcgattcatgttcgaataaccgaacgatcgcctctttttgctgataaccgaactctaaataaagctgcccatctggttttaaatacgcacgcacttctttagcaaaccgttcataaaacgctaagccgttattatctgcaaatagggccaagtcgggttcgtatttcaaaacggacgcatccatcacatgccgttcatcttgtgcaatatatggcggattagacacaatcacatcaaactgttggcccatcactggggttagaaaatcacccacgataaagttaacatgcgcgtttaattggcgcgcatttgcttgtgcaacagcaatcgcttctagtgaaatatcaattgcggtcacttcccattctggatgctcacaggcaagggtaattgcaatggcgcccgttcctgtcccaacatccaacactttaagtggtcggttctttggttgtgtagcatctaatatccattctaccaattcttccgtctcaagtcgtggaataagcgttgccggcgtcaccttaaaatcgcgtccgtaaaaattagcatatcccaaaatgtattgtgccggttgatcagcgataaacgcgtttaagtctgcttgatactgatcgtattcggcagtcggcatttcatcgtgataatgcaagaccagttgggtcgtcgtccaatgtttacgaccgagtagtaaaaagcgcgctgcttcacgttctttagcgtgttcttctaaaaataaaaaagcccaattcagggctttaagataagtgagctgtgccatcttgtaattgctccaatttttcggtttgatcgtaaagaattaacgcatcaatgacgtcgcctaattccccgttcataatccgatctaatttgtttaacgttaaaccaattcgatgatccgtcactcggttttgtggatagttatatgttctaatccgttcagaacgatccccagacccaaccgctgacttccggcttgaatcgtattcactttgattttgtgattcatagaaatcataaacccgtgactgtaagatttgcattgccttcactcggttttgttgttgtgaccgttgatcttgcatcgcaaccacaatcccggttggaatatgcgtcatccgcacggctgaagaggttttattgatatgttgaccaccagcacctgaggcacgataaacgtcagtccgaatatccttaggatcgagctgcacgtcaaccccatcatattcaggcataactgcaacagtcgctgttgaggtatgaacacgaccttgtgattcggtctttgggatccgttggacacggtgcgcaccattttcatattttaacttcgaataaacatttttaccggtaatcatcatcgcaacttctttgaagccacccacttctgtagccgtttcatcgatgatttcagtttgccagttttgtgattcagcgtagcgttgatacatattcaacaaatcacctgcaaagagactggcttcgtcgccaccagcagccccacgaatttccatgatgatattcttttcatcgttaggatccgttggtaacatcaaaatcttgatgtcttgttctaattgttccttttcatcttgtaactcacttaaatccgctttagctaattcttccatttctgggtcattagattcgcgtaacaattcttcgctttctgcaatgtcgtttaagacagtcttcaaacgcgtgtatttaccaacaatttcccgtaaacccgcttcttctttagacaattccatataccgactggtttcgttgatcacttctggatcagacattaattcctgtaattccgcatagcggtctaacaaactatcaagttgttcaaacattttatccatgaatgactagccttccttttcactctcttgtgttaccggtgggttaaaatagtgtttccgacaaacggggtagtatgcttcgttgcccccgatttgaatctgttcacccgtataaaccggtttgccatcgttcattcgcaagttcataatcgcttttttgcgacagaaccaacagatggtcttcatttcttcaatcttattggcaaatagcaataagtatttcgagccttcgaataattcattcttaaaatcattcttcaacccaaacgccatcactgggatattcaaatcatcaacgacctgcgccgcttcgattacgtgatgccgttctaaaaattgtgattcatcaatcaagacacacgctgcatccggattagtcgattgtaccaactcaaagatattcgtatccgagaaaatcggtgtcgcctcacgtttgagcccaatccgacttgaaacaatccccaccccgtcgcgattatcaatcccactcgtcaggatgatcactgatttattctgctcttcataattgtgtgcgacttttaaaatttcaatcgacttaccactattcattgcaccatatctaaaaaataattgcgccactctcaaacacccctatgttaagcacattttaatctagtatacctgaaaatcagcgaggcaacaatattcgccactattaaattctaaagtttcccttattttatttgcagatgcgtttttatatcgtccaaattgagaatttatgctatgattatgaacattgaaagggtggcaagcatgacaattaaaagctcatttgcaattacagcaggacgtttttcatattggtatttacatacctttatgaaaggtggcagctccctccccgggaaaatcgcaaccaagttcgatcctgctgtgttaaagcagttaaccaagaactacgacgtgattatcattaccggtaccaatggtaaaacattaacgaccgcactcactgtgcagacgttgaagcaaaaatacgatcatatcatgaccaattcgagtggctcgaacatgatgcaagggttgaccaccgcctttttagcagatcatcctcaaaaaggacaacggcaattggccgtcctcgaagtcgatgaagccaatgtggaacccctttgtcactacatcaagcccaaagcgattgtgatgacgaatattttccgtgatcagatggatcgtttcggcgaaatctacacgacttataatatgattctagcgggcgtcaaactcgttcctgaggcaaccctcattatgaacgctgacttgcctctcttttcatcggttgaacttcctaatccaaagatttattacggattcaaccacttaccagatggcgaaatgatggctccaagcaacacagacggcgttttgtgccccgtttgtgatcacatcattcattacaaattcatcagttatgccagccaagggaagttttactgccctaattgtggctaccaacgacctgaattagacgaagcagtcactgccatcaatcagatgcaccccacaaattcacactttgaaattaacaacgaaccgtttgaaatttcaattggcggcatgtacaacatctataatgcacttgcagcctatagtgtcggtcgattctttgatattccagtgaaagcaattcaaaaggccttcactgaagacaaacgaatctttggccgtcaagaagtcattcaattaaaagacaaagcggtcacattggtactcgttaaaaatccggttggcttaaaccaagtcttacaaatgatcagttctgatccagaagacttttcactcgcaatgttgcttaatgctaactatgccgatggaattgatacgagttggatttgggatggcgagtttgaagacttactcaaacacaacattccaaccgtgattaccggtggcgaacgcggtgacgatatcgctttccggctaaaagtagccggtgtcacggcagatcaattacacgaaactaaagaactcgatgcaacgatggcagccattgaagcagccccaaccaaacatgtttatgtattagcaacttataccgctgttttacaactacgtaagaagctggcagctgccaattatattaagaaaggactatcagtatgacccagacattaagaatttgtcatctatacggcaatttaatgaacacatatggtgatcttggtaatattttagtccttgattactatgccaaaaaagttggcattcaaactgaaacagaagtcattagtatcggtcaagatttcgatgcaagtcgttacgatatcgttctcttcggcggtggccaagacttcgaacaaaaaatcatctcagaagacctcaacgacaaaaaagcagccctcaccgaatacattgaaaacggtggtgttatgcttgccatctgtggtggttatcaattattaggtcactactatattggcgcaaacggcgacaagattcctggaatcggcgcacttgatcattacacattgagccaagataacaatcgttttatcggtgatattgtcatcgaaaaccgtgagtttaacgaaacctacctcggttttgaaaatcacaacggccggactttcttgggcaaggatgaaaaaccacttggttacatcaaacgtggtcacggcaacaatggtgatgacggcaccgaaggttgtgtttataaaaacacatttggttcatacttccatggtccaattctcacgcacaacggtgttttagccaaacgacttttatcgattgcggttagccggcgttttccagaatttgatttacaacaaatcgctgacttaccactcgaagaatcacgttaccaagtcgatgcagccggcgtcaaacgcgtccaaaattaacaaatcaaaaagtcgaccattatgcggtcgacttttttgatgtcttaatcatttcgcaagaaaaaatacactttttattcataaaatgataatcgtttcacaatacttgctcggtatactgactttaacctataaaaaggagcgaatcattatgttaaatcaaatgccagcagtcgagtccgttcaaattaatcggattgaaaatcatgataaagttttcgcaaccactgaaagtggtcaagaaatcgaattacatattaccgaccaacaaaaaaaggaccgcctcttctgggaatccctcatcaatatcctccgcgctgaattgtggttacccctgcaaaagagaacccacgaactactccaaaacgactggctaacggtcgatggctaacgtgtggctctgggttcggatgacttacagaacacgtttaaacgatcagaacacaactatccaaaagggcgctaacaaaaatattgttaccgcccttttgcatatcaatgtttcgttttttagcgttgccctgtccactccgctaaatactgatccacaaactggtgcatgaaatccgttcgcgcttgcgcgatttcgcgcgctgcctgtgtgttcatcgttgctgccaatttaaataatttctcataaaaatggttaatcacggtagacggttcgcgatagttttcctttgtcaattccgcccgtggttgaatctcaggatcataagcaaccccatcgtgtgcgccaccatacatgaaggtccgcccaatcccaatcgcgccgattgcatctaaccgatccgcatcttgaacgatttgcccttctaaacttagcgtttggtgttgattgagatttttcgaaaaggacatgtggtcgataatatcaaaaattgccgtttgttggccatcttgtatgccgttttcggttagtttagtttttaccttttgtcgagcctgttcaacatcagtcgcgattttttcatcaatcacatcatgcaataaggccgccaagataatcgttgttaggtccgtagctaactctttttgctgaattaaacaggcattattcacgacccgttgaatgtgatcgaatccatgaccgctgtgttctgctgccaattccgttcgtacaaattgttcaattgcttcgatttgtctttgcatacttgtcatcctactcttttaatcattaaaaaaaattgcaactacggctgcggttgcaattggttatattcagtttacttgttacccggttctgacgcaataatttgcatgtcaccttttaagtcccatgacttaatatcaaatggtaacacaaaatgcatattcttgtgaattgggtaagtttgcccatcggcaatcagttcgccttcaccatcgaccacggagactaaagtatagggtgccgttgtccgatcaaagtgtaagtcgcccttcactaaccattggtaaacactgaaaaatggtgacattggtggttgcacataagtcgtgattgttgaatctccaacatgttctgtttgaatattcaaaacgggatcttgatgcggcacaatcgtcgtatcaattgattgcttcaagtgtagttcgcgtttttcgcccgtcttagcatcaacccgatcataatcgtataaccgatatgttatatcactactttgttgggtttcaagcgccataatccctttgttcaatgcgtgaatcgtgccacttgggacgtagaaaaagtcaccagtcttaacgggcactttgcggagtaaatcatcccacttgcctgcttcaatcattgctgttaattccgctttggtcttggcatggtggccatagattaaataagcacctggttcagcatccaaaatataccaacattccgtcttaccgagttcggttggaccttcatgagcagcagcataagcgtcatctgggtgcacttggacagaaagacttgcttcagcatccaaaatcttagttaacaatgggaatactttaccttctgcattaccgaaatattcgcggtgggttgcccatgcttgatctaatgtgagcccttttaatgggccattttcgatggtactaggaccatggggatgggctgaaatggcccaacattcaccaatatcgccgtctggtaaatcataatcgaaggcttcagctaatttgcgaccaccccaaatttttttttgaaaaacaggttttagaaataaaggttctgtcaattcactcactcctaatgcgctttatttatcaatagtcccattttaccacaaatgtaagcggataatacgcaaatttgcgaatttgactaggcttttgtttctaggtgattatccgctaaaaattgtgccacaatcgcatcccgttgttccaaaaagaccggattatcagccgttggatgaatgcgattactcaggacaatcagccccgtttgccgcttgcgatccaatagcatgaacgtgccggtaaaaccggtgtgataaatcagtggctggtgttcttgcggctcaaagcgcaaatcccagcccagtgagcgcccgagatgttttggtgtccaatcacgatagagactcttaacactcgcctgactgattggtggctggtcaaccttcaactgccctaattggaactgggcaaagcggacaacgtcttttaatggagcaaacaagccggctgcaccactatgattttgtaaaatcgcacttttcggatcgtggacagtgccctggattaagccgcgttcggcactcaattcagtcgggaccgccaaacttctgtccggattaaacgtactggcttgcataccgagtggggttaaaacgagttcttgaatcaaatcctgaatcggtttttgatagatggcttcaatcatccagcccaaatacaacatatcaatgtccgtgtaaacaaccttttcaccaaaatttgggccgaccgttaattgcgtcaaaagcgccgtttctaattcggcagccgataattgattccgattcggaatgtagcccgttaaaccggacgtgtgcgtcaatagatgcaagaccgtcacccgtcgatctttaaaggccggcaacaaactatgcacttttgttcgtaaagaaagccgccctttttccaatagccgcaaaacaatcgtcgtcgtgccaatcactttcgttaatgacgctaaatcatacaactgatcagcttttaacggcactttttggggcactaattcggcctgcccgattacattagtcatcacttcagggccttcgatgatggcataagaaacaccagggacaatcccttcatcaactagcgctccaatttgccggatggtttgttcaaatcgcatgttaaattcctcctactacatcagtatcactagtatacaccaaacacggacaaaaataaggccgcagattttatctgcggccttatttgcgtcattcatgattaaattttaacgttgcctgagaattgactattgtacaagtcagcgtagaaaccatcttgtgccatcaaactatcatgggtcccggtttcaataatcgaaccgtgattcatcacgatgatgttatcggcatcgcgaatcgtcgataaacgatgggcaaccacgaaactggtccgattttgcaacaagcgttccatggcgtgttgaatatgaatttcagtccgtgtatccactgaactggttgcttcatccaagatcaaaatctctggatcggcaacaaaggcccgcgcaatcgtcaataattggcgttgaccttgggagatattcgaagcttcttcattcaagaccgtctcatagccatcaggtaattgacggacaaaaccgtcaacgtgcgctgctttggcggctgctaaaatggcttcatctgaagcatcagcgttcccatatttcaaattatcccaaatcgttccagtaaataaccaagtatcttgtaaaaccatcgcgaagtgacgccgtaattgttcccgagtcatatcgcgcgtatcgacacctttaagcttgattgaaccgccactcacgtcgtagaagcgttccaacaagttaatgatggttgttttaccagcacctgttgggccgacaatcgcaatcatttggcctggtttgacttgcaagttgtaatccttcatcaagatatctttaccttgataaccgaattcgacatgttctaattcaagtagattttggtcatcaacaatcgccgacacttctgatgggtcgtcactcatgttatcttcatctaagacttcgaagacccgttcagctgaggcaatcgttgattggattgtattcgctaagttggccaattgcgtgattggttgtgagaattgttgcgtatattgcatgaacgcttgcatatcccctaaagtaacttggccgtgagaaacacgaatccccccgacaattgctacgaagacgtaaccaatgttattgacgaacgtcattaacggcatgatgaccccagaaataaattgtgccttccaagctgctttatagagtaatgcattttgttcttcaaaggcatcaattgtgacttgttcgcggttgaaggtctttaagaccacttgaccagagaaattttcttcaatttggttgttcaacaaccccaaacttttttgttgcgctgcgaagaatttctgtgatttcggtgcgacaatcccgacgacgactaaactgagtggaatcgtgactaaggcaattaaagtcaattgccaactaatcgagagcatcatccacataacgccaataaatgtcacagcactggttaccatttgcgttaaactttgttgcaaggtacttgcaatgttatccatatcattaatcgcacgactcatgatatcgccgtttgagtgtgtgtcgtagtaattaatcggtacccgttgcatcttgtcttttaattctttccgtaattcatagacggtttgttgggaaatccgcgtcatgatgaattgttgtaagaaactgaaaaccgctgatgctaagtacatcaaaatcaccgtcataataatgtgttgaatcttatcgaaatcaattggtaagccattcatcggcatgcccgctttttgcatggcattgcccttcataacacccttgaagatttcggtcgttgcttgtcctaatacttttggtgttctaatttggaaaataacggagatgattgctaaggctaacacaatcactaatccgattaaccggctagacatgtaggttaataatcgtttggttgtaccccaaaaattcttcggtttttcaacgacaccacccatgccacggcctgggccatgtccaccttggggtcgattggttgttgttttttcagccattagtcttcatccccctctctgatttgtgagttaataatttcttgatatgtggcgttattagccttcaattcagcatgtgagcctttaccgaccagctggccttcatccaagaccaagatggtgtcggcatcggcaacggttgatacccgttgaccaacaatcacaacgacactcttttgaatttcagcatcttcttttaaggctttccgtaataaggcatccgtcttaaagtccaacgctgagaaagaatcatcaaagacataaacagccgcttttttaaccaacgcccgtgcgatggcaagccgttgacgttgaccaccagagaagttgcccccaccttgttcaacgtgactatctaagccaccttcaagttcgctgacgaaatctttagattgtgcaatttcaagtgcgtgccagatttcatcatcggtcgcattcggattcccatattgcatattttcccgaatcgtcccggtaaataagttcgctttttgagggacaaatgcaacttgttggtgaatgtcatggagggtcacatctttcacgtttaaccctttgactgtcacttcacccgtttcaacatcgtaaaaacgaggaatcaagttgactaacgtggtcttccctgagccagtgcccccaatcacggcgactgtttggcgcgctgtcatttggaaatcaacgttttcaagcgctaagtgttccgcattttgataacggaagttgacctggttgaaagccaagcttgctggttgatcaccaaacgttttaggcgtcgctggatcttcaatcggcgtgtgtaaatcaagcacttcattaatccgcactgctgaagcttgcgcccgcgggataaagacgaagaccattgaaagcatcatgaaactcatgaggatttgcatcgcataagtcatgaacgctaataaattcccgacttgcattgcttgattggcgattaagtgtccacccatccaagtaatcgcaatgttagtcccactcatgattaacgtcatggctgggaacatcactgacataatactataaactttcttcgcattttgcgtgtagtcagtattagcttcatcaaaacgttcttgttcgaacttgtcgcgccggaatgctcgaatgacccgaaccccggttaaaccttcccggaaaactaagttaatccggtctgtctttttctgcattgccttgaataatggcacagcgaagtacatcaccccaccaatgaagagtgccatgattggtaagacaaccaagaaaatggatgtaagttgcgcatctttttgatacgctaagaaacttgcgccaatcaacatgataggtgccataatcatcatccgtaagaacatcattgccacattttgaatctgcaccacatcgttagtcgtccgcgtaattagtgaagacgtcccaacttgatccatttcatcgtgtgagaagttgatgaccttccggtagatatctgaacgtaatttttggcctaagccttgtgacgtccgtgccgcaagataaacgttgcagacggctgcaataatactaattaatgaaaaacctaacattttaaagcctgcttgccagatataatcaatattccccttagcaatcccgtcattgacaatgtcggaggttaaattgggtaaataaaggttactgacaacctgaatcgtcatgaataaaaccgcaccaaagacggcccaacctgacattcttttctttgcaagtttaagcatgttgtgtgtcccttctttccttatccttgtttgctggcccctgtttctaaccagcctaatactaattcgaagcgttcttggacctgttcaattgtaatcgcatggtcactttcttgttgcagataatacgctgcaatactttgaaagaccgtcgtcatcaactcatgaaataaaattctaagcgcttcgggttgatctgcgttaatcttgagcaagtcgtaattgacgttttcttctaaaaagcgcatcccatctacttgtttggcatgcattaattctggtgacatcttgcgctggttcttataatccatatgtaagaagaggtgcttgtaaaatggtgcattttcaccattaataatctcttctgccatttcagcaaagaattggcgaattgccttgaatagatcaccatgaacagccaacagactcttttctaaatcctgctttgaactgtcgcgtaataagctaaggtcgtagaaaaaaatatccgccttatcttcaaagtactgataaaaactgcctcgcggaatctccgccgttttaataatgttgctgacagatgcttcattaaacggtacccgtgaaaactcagcatgcgcagcttgaatcagtcgttgttgcttttcctcaggtaatctaaaaaatgttttcttcggcatttcgatactcctttctgaaaattaatgacagagcgtcataattgtgacgtaatgtcataatacgccaacttaggcactcatgcaagcattaaatccacaaaaaaagaaccggcagactatcgtctgccggttccctttaaaaggcgctatttatcgtctttgtccattttttctttaatatcatccatcacgtcgttggctttttcagcaactttgtctttggcatccgctaatttttctttagcttcacccataaagccctttgctttacctttggcctcagtttcgcgatcaccagtcaccttaccggctgtttcttgtactttaccggttacttggtctttcatgccatctaacttttctttatctgtcattcaaaatcactccttcttattggtctacctatatgataggatagctaaccaacattagtcaaaatttatgattatgagtcgcattatgtcagtttaccatcgcgcatcacgtattgatgatctgtataatccaagacgcgttcatcatgggaaaccatcacaatcgtctgtcctgtctctttcgtgattttagccagctgctcagcaacctgtaaggcccgtttactatctaaactagcggttggttcatccgcaaaaatcaaatctggctgaccatacaatgcccgagcaatcgcaactcgttgacgctgaccaccagataagctcgttgggtactgacgtcgttgatcccaaacacctaaattggttaatagttgttcagctgattgtggcgcttgcttttcacgtaatcgatcgactagttcgaattgttcttcaaccgttaaaaatggaaccagattcgaactttgtaatataaagccgaaatcgttaaaccgtaatgcagaccgctgtttttcgcttaattgactaatctcttgatctttaaaaaagagcttcccactcgttgggccttgtaaactacccataatcgttaataaggtcgtcttcccagaaccagatggtccggttaaaccaatgaactggcccttttcaatcgttaaatcgatttgatctaaagccgtggtttgctggtcgcctgcgccaaattttttgacgattttttctaaacgcattaaagccatcctatgcccctccaatcgcatcaagcggatcaatctttagaatccgccaaattgagaataaagcgccaatgactgtcatcacaagtaaaacagcagaaaaggccccaattagtaaaggattatttgtatacggcaccgccgctggtaataccaatgttgtcaatgcgttacacaacaaaccaaggccaatcccaatcacccctaagaatacagattgccacattaaactaccaactaattggccacctgaaatcccttgtgctcgcataaccccgtatacggccgttttttcaatagtaataatatacatgaaaatcccaacgataaaggcgacgatgactagcaatgcgccaatcatcaaaccaaacgtcttaacctgtggcccataccccggaatcttatcgattaattctggaattgtcagtttggtcagctgatccgttgtcttaatccgcgcgtttccctttaatactaaagcattaatgcgcgtaatctgatcagtgccgtagcgcattcggctaaaatcggtcaaccgcaaataagtcaccggttgcgtattatagcggtggttcgtcgtaatcccaacaattttgtacttttgttgacgcccattcaatttaatttgttgatttaaagcaattccttgtaagccgtcgtcgaccacaatctcatttgcctttttaggataccgtcctttttgcaacttaggcttcaaaaaagcatcaaaatcgataccaaaaacactcgtattttgcttacttaaacctgaactactcacaacacccatcatctgagcaagttgcgcatgatttttctgtgcacctttaatagagggtaattgatcaacatctaattcagaagcagccaagtttttattcgcatactgactaataacaacttctttggcgtgccattgatcaattgccgaacggttattattggctagcccatatgccaaccccgttaaaaaatagattaaatatgcaattagaaaaatcgtaaaaatgatcaacgaataacgtaatttagcatgtttaatttctttaattgctaaatacatccaaacacccctttcttaactgttttaatctaacataaagcatcgtgccttgaacagcaatccgcattcaatcttttattcattcacgggaatatgctatgataagcacacggaggtggtgcttatcaaacacgtcaaacatgggattgtctttttgcttctgattatcatccaacaagttcctttaatgattgtcagtggcttatcattgctccctaaggcccaacagacaacccatctaattttagtctttggttggctttttctaatcacgactatcggcattactgccctaatgtggtattactaccaaaaaattaaatcaacgcgttatgaccaacccttcaccaaacagacttggtggacaatgttgattggctttatcgcgatggttgctgtcaataacggtacaatcccgtttatgcatactaccggtaatgccaatgttgatgcactaacctcagtctttcagacgattggtattttcatgctaccatacgccctattcttaggtccgattatggaggaattacttttcagagggttcctaatgaattggtttttcccaggcacaccaatcatctcaatcgggttaagtgctatcttattcggattgatgcacggcgcaactgatccgatttatttcatttcaaaagcactgcttggcctaattctggctatcgtctactatcgcacccataatattaagagtaatattgccttacacatgttgaataacattactgctggctttacgattttttaaacgactagaaaggaagcatgactatgtctgcattaacaaccatcttaacttacatccaagaacatcctgatgaagtggttctagaaccgtttcaatatgcgaacgtgattcgctttggcattagtgaccaagtcgatctgccagatgccgagaaactgttccctgatatgcggctacacgttaaccggattgaccccgagtacgtcaaagaacaccatgacttattgacgactttttatcaacaaaccgaagaaaaacaaaaagacggcttccaagatgtgtggattactaccgcccatcttagtgaccgtcaactttatttagtggatctttcttttgaataagcctcattttgaacagctaaaggtcagctgtattaagtatgctattttaaccttgtttctctttgtcatgcgtgcctttattgcgcatcccatcattatgattgccagttggattagcactgctgtttgcggcgcatatttcattgccatgttaattgtttattattacggctaacgttgcatatgtttggtctcagcaatcacttcttctgtaaaatacaattgaaaaccaaagaacaccgtcaacataatcgcagctatccatgcagtgcgcacattgattaacttaacaattaaccctgagctaatagtaccaatgaagaagctaccaacaattaacccgaagtaccgggctttttgttggtagtttttttctttggtcgctaaatatagataagtattttcgattaatttcttataattgccggtcgtaaaagcattcgcatatggatagccattaaccgttgaataactcgctaattgcatggccatcgacatcgacagaatcggtgtcacaaacatgttgggaatcgcggttgataaaaaaccaactactactaaagcaataatttgaaaacctaataaccacaaccgccaaacattcaacccaccagtgttaaaatgccgcttcgccagctgcacaataataaccccaaacccaaatgaaataatgggtaatatcttttcaggaagttgtgcccactggttcgttgcgatatctaagccgatgaacacgatattaccggtctgtgcactcgcaaagacgccaccacgtaaaatcacacaatacgcatctaagaagccaccaagaaacgttaaaaacatcgccgtgcttagccgatcatgaaaccctatttctttttgcaacccaatccctccaaatcaatactcttattatacgcaaattaaaattgaaatcaaaaaacggattgcactatttcacagtcgaaataaggtacaatccgctttacactataaattaattgaattgacatcttgaccatggaccacttttctaaagtcgaccagtcctaagtccaaaccgcgcagcaatacttcagccgtcccgacgttggttgccaacggtacttcataaacgtcagataatcgaattaatgcattcacatccggttcgtgaggttgagcagtcaatggatctctcaaaaagattaccaggtccatcttattttctgaaatcaacgcgccaatttgctgatcgccccctagaggacctgacttaaaccgtgtaatcggcaagccagttgcttcaataattttttgaccagtcgttccagtcgcaaataattcgtgttgcgccaaaataggtttataagccgtcgccagtttcacaatcgttggtttctgacgatcatgtgcaattaatgcaattttcatctgaatccctcctaatgtctgcggtgtttaaccaccgtaaaaaagtgtaacacacttgccaatagaatgaagaagattaaaacgaatgacacataattaagccaaaactggccaattggcaacactaagttcactaattgttgcagtaccatcgtaatcaaggttgcacaggcgaccatgccaaatagttgtatataccgtttcactgtatcatccgtcctctttgctttagattgaatgcttgcgccgacttggcgacattccgcttgtttctgcgctgaaagtgtctttaaaccatacgtttttgtctggacaacttcccggatttttaaaagtccagctgcccccaagactttatcaaaagttctaaaagtcccgtcagtcacaccagtaaccaattcctcagctggactggcataacaactactaatcgtaatgtaacttttgcctttgaagcgatctggtaacgcatctcccgcccgattaaatcggactaaccgttgccgcacgcaatccaagaagtttttcatcacacccgacattgcacccccaataagttggcgcagccagtatccaaacatcggctgccaataacttagcttccagttcatccaataccggattggctttgccagcatctggtaatatttgataatcatttaaaaagatcacttcaacgtcatcttccggttttacacctgctaaaacggcatctaaaagttgcccattgaccccatctcgttgatgactgcctaacactcctaaaatcttcatctgatcaagcctcactctttatactactttcagtttacacttccaatcactaacttaccataaaaaaacgcccagaccaatggcctagacgttgtcattattttagtttagtaccaaccattacttaaccagaagctcttagcggtatcccatgaaccataacgacttgttacatattgatctgcaacgcggtcttggttagctgctgaataatcaccatttaagtatgaagctgataattgataacggccgattaattgaccgttacgtgctgaatatgaaccgcctgattctttttgtgcaatccattccttagatgaactcgttgtagttgtagttgttgtttgtgcagctacgggtgcttgttgtactggtgcagcttgaactgcaggttgtgcttgaactacaggggccggtgtttgaacaggtgtagctacttgttgagttacaacaggggctggtgttgttgccacttgatcagcatcaattgttaattgttcaccaacaaagatcatattaatatcagcaatattattagttgttgcgatttggttaacaagctctgtactaccattgaatttttgcgcaatggttgaaagcgtatcaccatttgcaacggtataagttgttgcggcactggcttgtgattggttaacgaaaagtaacccggttgttgcgacggttgttaaagcggcactgtaaagtaaagtttttaaagatttcatattttgaatggactccttattgtttaaattgatttttctatctgtttaacgtgggactaatataccatcttaaatccgttagtaaatatcaaaaccataacaattgatgacaaatccgtaacaaaatgacggcaatttcacctaactttgtaatgaagcccacaatttaattgacttgtaatcggcctaaaaggttataacaccaaggattacagtccataaaaatgctaaatatgctattttgaattaattaaccctctttcaaaaataaccgccctatttaacgtaataataagacgaggtgatcaaaatgaaagttttaaaattaaatgatttagatttaaacgtcgcattggatgatcgaatgattcaaatttccggtgctcaggacacaacattaattttcaaaagtaagctattagcacactattggttcttcaatttacgggctttagctaagattgcggatcgctatgcgatccaaatcatgtttgagacagagaactacaaataatttgccctatcgatataaagccacaaaaaaagagctgattactcagctctttctatcttaattgggtatatagggctcgaacctataaattccggattcagagtccggtgccttaccaatttggcgaatacccaatatcatcaacgaatactatgatactgcacactccagacgttgtcaattatgatttttaacaaatctttaaaagaggactatactattcttggaggtggttccaatgatgaaaaaagcagaaatcgaaaaattatttgacgggaaagttgccgtatatgatcaagaccacgttgtgattgattggatagattcacgcaggacgcttgaagtcacaattgataacgatattctaaatctactgataaaccatcaggactatattcggaatatcttgaaacatttaaagagacaaacaaatcgcactatgaccaaggaaattattaacattaatcgtcgtaactataaaatcttcatttagcctcgctagagtcaattaaccattgacattacaggctttattcgctaagatattagttgttccgaacattgcccgttggtcaaatcggttaagacgtcgccctctcaaggcggagttacgggttcgatccccgtacgggtgatatttaaaacagcctagaacccagaaaagccgttaaactaaggtttagcggcttttttgtttgtttaaaacgtgtaaaaaagctagcctcctgacgctttagttagggggctagtttttttattgcgtagatttcttctattaaaatggcttcatttgccacaattatttggctaccaaaccagccactgattaaaccttccaccttactgggtacaataccttctattgaacgttctgctttgtcgatttgaaccggataacatttaacaattgcgtcattgatggtattagcaatcatctcagcagtcatcgcctcaatgtgtttttcattgcgcttacgatcttgtacgcggttattcttatctaacactgccgtatgatcgcttaaatagaaaccttgccatttcatcatgccacgatcataataatcatacttcaaaaattgattaaccaaattgggatcatattcatcattattcataggcgttccctccagcatgcccaccgactaagccagcacgctcaattgcagtcgcaccttttactttgctagacaatttgaccaccgatgtaaaaccgtagcgcttgcgaatttcatcgaccgtgctatctaatttctgctttttcaaattaataaactgtgtgtcgaacatatctaattgttccgcactatcgtcaaccaaattgctgcacgcaatactaatatgccgaatcgattcgtgttgccattcttcacgaaaaagttggatggcatgttttgtgagttgctgattagcattagtcgcatcaatcttcattgaacgcccaaaaccaccacgcgatgcatcctcttttgcagcaaatgaaaagccaatccccagactgataaccgtggtcgccttgtgatgcgccctgagacgtgcagccacttgctctgcaatttcccgaatcacaacttcaatctcagcttggataaaataatcgcgtggtaatacctgactattcccataagacttctctttggccttatatttatgccgtacaacggcccgatcaatcccccaactaaacgcaaacaactgcgcgcccatgacacccatttcttgttttaaccgatagggatttgtatgcgcaatatcgtacatcgaatgaatgtgtttctgattcagtttctctgccgtacgatgcccaattgaccagacatcatctaactgggtcactggccacagtttatctgggacatcttcataatgccattctgcaatcaaactgtgattccgtttggcctcaagatccaatgcgagcttggcaagtagcggattatcgccaatccccaccgttaaataaatgcccgtttctttttttacagccagctgaattttacgtgcgacttcgtacggcgtcgctccaaagagttgccaactatccgtgacatcaagtaacgattcatcaatggaatacggttgaatatcttcttctgccgtaaattgctgaaaaatacggttaatcttctggttcacttggatatacaaattcatcttgggtggctcaatgattaaccgtttatcatgaattggaacatcccgggcacgtgttacgttactgataccaaataatttcttagccatgggactggctgccaatactaaaccactgcccgtgtttttctccgtggacatcaccaccaaaatagcctttaacggattcagtttcaaccgaacggcctctactgatgcgtaaaaagatttcgaatcaatcattaaaatcacgcggcgtggttcattctgatagtcatacacgactcttcaccccaacttgaatctgacgcacttgttcatctaattcgcgttgccaccgattaatctcaatcaaggtgacggctgatagatgacgataaataaattgcggaaacttatcgcggttgtagtaataattcattgagtcaatcaaatcatcactatgattcaccgctaatcgccgcaattctaaaactccaaagccatttaaatataaactcaatcctgtttgatctagcgtaatcacttctttattcgtatgcatcaggcacacctctttaattcatcttatgtcctcttaattatacgaacatacattcgatttagtcaagtgtgatttctcagagaacaaaaaacgctcaatcaaattaaatttgattgagcgttaaaggaaccttaaattttaataccaaccgttacttaaccagaaactcttagcggcatcccatgaaccgtaacgacttgttacgtattgatctgcgacgcggtcttgattgactgctgaatagtcaccatttaaatatgatgcggttaattgataacggccaatcatttgaccgttacgcgctgagtatgaaccaccagattctttttgcgcaatccattctttcgctgaactagttgtcggtgcaacagcagctgtttgttgaactggtgcagcttgcactgtaggttgtgcttgaacaactggtgctggtgtttgaacagcggctggttgtgcaacaactactggcgttgtcgtttgaacaggggttgctgtttggtcagtgtcgattgttaattgttccccgacaaaaatcatgttgatatcttgaatgttgtttgttgtggcaatttgattgactaaatctgtgttaccggcaaatttttgggcgattgttgataacgtatccccagttgcaacggtataagtagtagcggcacttgcttttgattgaccaacgaaaagtaatcctgctgttgcagccgttgtcaatgtagcgctaagcaataatgtcttaaaagatttcatgtaatagatgtgctccttgttgttttgatttattaacgtgggactaatataccatcttatattcgcttgtacatgtcaaaaccataacaattgatgacaaacaggtaacaaaatgacggcaattcccgcgctaattgtaatgcacaccgcttacttgactgctattacacaaataacgcctaggacaatcttctgtcctaggcgttataaactaatttattgatgttattcacgacgttttaaatgatacttagagaccgatttttggcggccaagaactagcggaatacgttccacaaacacatcactatagtccaatccaaaccatgaagccggtgtatcagtgaatttttctaaccataaacgcatttgaacaatccctttatccattgctcgaatttgagttgctggtgataaatcttcttgcatgatcacaaacgagaaatcgccaacgttccgatttggaattgttgtgtagcgttgtggttgtgctggtaattctccccgatgaatcatttcttgaatgatttgacgaataaagatgttcactttttgttccatcttaaagcctagatacaactgaacgttgacaatgtagtccgtcccaagcgtatctgcggtatattctgccgtgtacggttcatcagtaacattgaccgcaacaaaccagtaaacttgcgcccgttttggtcgtttatccaaaatagaataaagaatattcttcttaaccatattcttttcatatggtttattctgtggttttgaaagataaaccaaattagtcgtatacatagctaacgctgtatcgtctcgcaaatcatgtagttgttgtttataagctagtaatgaaaccgtacttgccttgaaagtattactttccttaatcgtattactacgataccaaacaaacatgatcgatagaataaacgccgcaattaagactgtcacgtaaccaccatgcatgaatttagcggcacttgagatgaagaaaataacttcaattgtcccgaagaagatgagtaccaaataagccaatacccatttcttctcgcggcgtcccaagtaatggaatagcaagatagttgtcattaacattgtaatcgtaatcgccaaaccgtaggcagcttccatgtgcgctgagttcttaaaatagaaaacaaccattaaacaaaccgcccatagaatccagttaacgattgaaatatagagttgcccttttaacttagccggataatcgaccttaattcgtggtaagaggcgcaacttgattgcttctgatactaaggtatatgaccctgaaattaaggcttgtgatgcaataatcgccgcaattgtagccagtaaaatcgctgggacctttaattgggctggcatcacttcaaagaatggattgaaatcagaaatatgttgatatgccgcaatatctttatgttgtaataaccaaacaccttgtccaaagtaattcaacactaaacaaagcgcaatgtatggccaactaccatagatattcaaccgcccaacgtgccccatatccgaataaagtgcttcagcccccgtagttgccaagaaaacactgcctaaaattagaatccccaccttattctcagggctaaacagtagttcaatcgcataatacggattgagtgccttgagcatcgttagatcccccattaagttaaccaaaccaatgccaccaataaaggtaaaccaagttaacataatgggaccaaaagatttaccgattagatcagtcccaaatttctgaatgaaaaataagaccgataagattgagaccgtcaataaaatcacctgatcttgattattaattaaaacgttcccattaattggcaaaccctttaacccttcaatcgccgtcgtgactgtcacagcaggtgttaacatcccatccgctaataacgtcgccccaccaataatcgcggggatcacgagccacttagcttgcttacgaatcaaagtgtacagtgcaaaaatcccaccttcaccattattatccgcccgcaatgcaatcatgacgtacttgatggtcgtcatcaacattaacgtccaaaagacaagcgaaatactgccgatgataaaatcgcggctgatgtttaccaaaccgccattcccctcaacaattgatttcataacatataatggcgacgttccaatatcaccgtaaacgacgcccatcgtaatcaaaatccctgcaactgataatttatgtccagttgtttgtttagttgtctttaatttcatgatttgttacttccttatactccaatatagcattatcgtagcttgttccagattgaaagtccagtcttatcatcaataattatcaatccactgtattccatgctataatagggacactgaaacaagcgagggatacaaatgaaagataaacgtcaatttgaaattgctaagaagcaatacaagaaactagcgaaccgaccactatcaaaggaacgtaagaaagctgttagtaccgcttcaacttacatgttcacaatcttagttgtggcctttattctattggttatttacttgttcgttcactaaaactgcttacgcagtttttttttacgtatttttttgcagaacatatattgaatattatttttcgtacgtatataattaaataaatagctttttaagcttaaattactacaaaaaacgcgaacattatcgagaaaggcggctctcatgccctcaaaaaaacaagtttatctcgctggcccattttttagccccgaacaaaacgatcggttagatcaagtggctgatttactcattaaaaacccaacgattgatgctgattcacttttcaaaccaggccaacacccttatcctgatgcagaattcggtactttcgaatggcaagtcgctacttttaatgtcgatacgcgtcaaattgaccaagcagacgtcgtagtcgctgttatggattttaaatctgaagaaggcgaattcgaacctgattccggtaccatgtgggaatgtggttatgcttttgcccacaataaaccagtgattctcgctcgtttccgtgataatttaccaattaacctgatgttggctggttctgcaacggccatcttcaatggtgaagcggatattgaaaacttagcgacttatgatttctttgaattacacaataaatatgttcaaacagatatcttttaactcaaaaaagaaccgactgatgcgtcggttctttttttttggcctaaaagccgttattctcgctcaattcacggtaccatcgaccgctcttcttcatcgtgcgctttgcctcatggtccaaatcaacacagtagaaaccataacgattccgataaccatttaaccaagaccaacaatcattgaaggtccaagtatgatatccaaaacaactgctgccggcttcaattgcacgatgtagttgcgtcagatgttcttgcataaattcaatccgatagtcatcttgaatttgcccatcttcacccataaagcgttcttcatcggcaacacccattccgttttcagaaacgtaccacggaatgttgtgataatcatttttcatcatcattgccacatcgtacaatgcttctggataaatctcccatccacgatatggattaatcttccgttctggccaaatataattagcatataagtcttccggtgtttgtgctgggaacttcggattctctggtgcttgaacccgcattggttgatagtagttcacgccgataaaatcgacacaatgatcggcaatcaattgccggtcgccttttttcgtcattggtaataactcatgttttgttaagaggttaattaattcttctggaataacgcccaaaacagttgggtctagaaaactcttagcgagtagtaagtcagcattttgtttagccattaaatcctctggtgcatcactcttagcgtaagctggcgtgatatttaaaataatgccgatctgaccatccggcttcacttttctaaattcagcaacagctgctgtatgcgccatcaaggtatggtagccaacctgaacagccttcttgaagtcaacaatgtctggataatgatagcccgttaagtaaccacattcgatatgcacgataggctcattaaaagtcgtccaacgatcaaccaagtcaccaaacaattcaaacgcagtttttgcgtagaatgcaaaggcatcaactgcttcgcgtgtctcccaaccgcccttttccattagccaccaaggcatatcgaaatggaacagattaatgatcggtgtaatgtctgcatcacgtaagcgcttaaaataatcccgataaaaatcaaccgctacttgattaacatgtttgccatcgggcattaatcgcgtccaagcaatcgatgtccgaaatgagttcaaaccaatcttttgcatattttcaacgtcttcacgatacaaccgataagtatcactagccgtgtcaggcccttgatcgctattaaacttatcaggttgcatctcaaaccatttgtcccaggttgatggggacttaccataacttagggagtatccttctgattgaggtgcggatgttgctgctccccacataaaatgctctggaaatttaatcataaacgctactctccttaaatgtaatcgccaacattttatattgtaccatttctctaaagtggtcgcacacctttctcagtcgattatttaatatgcgtacctccgaaatattatacacgttaaataaattgcagactgagattaataataatgtcaatcaaacttgtcgctgtcgatatggacggtaccctattaaatgaaaataacatccttagccctaaaacaatcaaagttgtcaaagctgctaaaaaacatgacgttaaagttgtgctatgtactgggcgaccactcaccggggtcacgccttttctaaaagaactgggtttaactgaagccactgactatgtgattacgttcaacggtgctttggttcaaaatacggcaactggtgaaattctagtgcgtcacactcttgcgcatgaccaatatcttgaacttgaaaccctctcccgccaaatcggttctcatttacacgctgaagacgatcaattcatctacaccgccaatcgcgatatcagtccttatacagtcggtgaaagtgccctcgtcaacatgcctgttcgtttccgccatgtcgatgaaatcgcacctaacaaggccttttcaaaagtgatgttaatcgacgaacccgccgtcttagctgaagccaaaaccaagattcctgctgattttttcgatcgttatcaatttgttcaaagtgaagcctacttcctcgaagtactcaacaagaacgccggtaaaggaaatggtttgcgtgatttagcaaatgccttaaatattgatcaatctgaagtgatggccattggtgatcaaggtaacgatttatcgatgctagaatacgccggcttcccagttgccatggataatgccattcctgaattgaaaaaaattgctaaggttgttactaagagtaaccatgaaggccaagatggcgtggcatacgccattgaaacatacgcctttgaaagccaagcctaatcataaggggagttattatgactacgttaattgatctcgtttacgcgtccccccttttctttttgattttatttattggtttacagcgatttgaaaaacgccgattaatcaacggcattgtgtttaactttttcctcttcagcgcattaatggatgctgcgctcattgtgattcgcctcaataacgaaacgctgaataacattgcaattgctgctgccattgttgtcgttctaatcgtcatgttcttctacttattcggtattgtcttgttgctgtggaacgcgtatattgtctggaaaaaagaaagtcacacgttatccaacatgctgaccctcctcattgcgttagccatcattggctcatttttcatcccaatcatcacgcgcttgttacacattcccgccgatattaaattatttgtcagcataattgtatcggtttttcttttgtatattccattgttcttctatttatatctaacctcactgattatctatcaattcaaccgcccccgttatcaacaagattacatcatcgtcttgggtagcggtttaatcgatggtcaattcgtcccaccgttactggccagtcggattaatcgcgccattcgattttatgataaacaagtcaaaaaaggccgccctgcaccaaaactggtcttttctggcggccaaggtccggatgagaagctgcctgaatcagttgccatgcaacgttacgccattgagcaagggattccgattaaagacaccctcaccgaggaaaaatcagtcaacactttacaaaacatgcaattttcaaaagacattatcatggctgataccactaaatcgaatcctaaaattatttttgcaaccaataattaccacacattccgcgctgggctttttgcaaagcaagcccgtttgaaagcagatggcattggcgctaaaacatcgcgttacttcttaccaaatgcaatcatccgtgaattcattgcaattctcaaaatgaaacagcatcaattcattttagtcgcaattgcaagtgtcgcatttgcagccttaactgttttactcaatcatatgtaacgtaaaaagccgttgtggacaatttgtccacaacggcttttttatgatgcctatttagcccgtgctgcacggacataatgaataatgagcgtcagtagaataacgccaaacacaattccagcaaacactaggttaggaatttcatagtcaatggctggaatcgacaagaataatttaatcgcgatgaagagaattaagatgtaagccatcggatttaattccggaattttcttcatcaattgggcgatgagttgggcaatcccccgcatgcagataatcccaatcattcccccaattaaaacaatcaccggattactagaaatcgctaaagacgctaatacggaatcaattgaaaaaacaatgtccatcaattcaatcgaagcaactgtgcgccagaaccgatgcggactactgattttagaacccgcctccggtgttttagcctgcttcggatgcccactctttctgaaataagcaatgactaagtaaattaaatacaatgaaccggcaactttaatttcccacaaatgaattaaataggtgccgacaccaataataatgaagcggaaaacataagcgccccataagccatacaccaatgacttttcttgctcaatttttgtaggtaatgtttgtgtctgtgccgctaatacaacagcattgtctactgagagtaagcattccataatcactaacgttaaaattaaaagccaatcttcggacgacgtaatgacagtttgccaattactcagttcaaagaatggttgatacaattgtacaatccaattcatctaaggttcctctatctctaatttctgttatttaattcctgtgactatcttaacgatttttcatgaaaataacaaatttattggttaattatgtaactagcacagcatttttattttataggctctggaaatacggtatactttttatagtaataattaataatattaatggaggtcgttttcatgattaaagaatttaaagaatttattatgcgtggtaatgtgctagatatggctgtcggggttattttgggggctgctttaaaaagcatcgtggactcattaacaaagaacttaatcaatccaatcatttcattattcgttggacaagttgatctatccggtattgcgcttaccattccaggcaccaaggccgtttttaaaatcgggaacttcctaaacgatgtgattaacttcttaatcatcgcatttgttgtcttcttaatcgtcaaaggattcaacaagcttcgtgacatgggcaagaagaccgaagaagaagaagcacaagtagtcgaaacgaaagaagaagtttacttaaaagaaattcgcgatttattagctaacaaagaaaaataaagtcacaaaaaaacgcctgaacaaattgttcaggcgtttttaattgttagcttattgaaatgtgcttccccaaagctaacccgttcaagttagcacgcttatcttttaaatctgttttcaaataatggactgactggtttgttttcatggattcgtttgatggcgtccccaataagtggcccgacagaaacttgtaccattttatcgattaatttttcttttggaagattaattgaatctgtaacaatcatttgcttaatcactgaatcttcgattcgttgaatagctgggccagacaataccggatgtgtacaacatgcgaatacttctgttgcaccagcatctttcaatgcttgcgcagctaacgtaattgtgccggcagtatcaatcatatcatcaatgatgattgcgcgtttaccgttaacattcccgataatattcatcacttcagaaacattcggtcttgggcgacgtttgtcgataattgcgattggtgtctttaagaaatcagctaatttacgagcacgtgtaaccccaccgtgatcgggtgaaacaacaacagcattttcagccaagtcattgctcaagaaataatcagccaataaaggagcacccatcaagtgatccactggaatatcgaagaacccttggatttgtacggcatgtaagtctaatgctaaaattcggttagcccctaccatcgttaacatattagccactaatttagcggtaatcggttcacgtgagcgagccttacgatcttgacgtgcgtaaccataataaggtaacacaacattgattgttttagcagatgcacgacgcaatgcatcaatcataatcatgatttccatcaagttatcattaactggtgcagatgttgattgaataatgaaaatttcgtcgccacgaatactttcttcaatattaatctggatttcaccatcactaaaacgtttaacagaagattttcctaaaggaaccccaacttcagccgcgattttctcagctaagggcttattagagttcaaagcaaagattttcaacttagggtcgaaatattgttcagacatgtcagcctccaaaaaatttatgttagtacctatttaaagtttaggcattttcaccccggaaatcaagattaaaacttaaaaagttcacaaatgttgtaaagtaagcgctgttcattagaaacgtgagagaaaaagaaaaagttaatagcgattaccatcgaacctcccgtttagtatcccattatatccccaaaaatgcttgtttattttggattatggattaaattgtcatttagcgcaagacaaggtacactcattgaaaaaggcggttactatgacccgccttaaatacactatttttaataatctctatcttttaattctggtaattattattacttccgatcgcttatttcacctcagcatgccctattttattcttggtcttattctattcgttgccgttttgatttatcagtatcattttttctaccccagtcacccgaactacaatcctaaaaattatcgcattacaaaaatgggctgggcaaccaccgctgttgggtgtcttatcatacttcttctaatcttattttcaagtggttcaatttggatttggcccgcttttctaatcgccttcttaatacgcgattatttctcaactttaaaataactacaaatatcaaaaaaatcgtccgtaatctcaaaaataagattacggacgatttttattttaagatgtgctttacaacactaagctaatcatcataaacacactttaatccaaaacgtgcttcttgtcaccgtaatttccgcttaatctaacatcgtattaatgctcaattactaaccgcgacagccagcactctattgccattcttcgtcatttgctactggtagttttgcccagtagttttctttgtttgtttgacgggcacgggcgatggccattgccttttctgggacatcatccgtgatggttgagccagctgcaatgaaggtgtgatctgcaatttcaaccggtgcgacaatgtttgagttgctaccgatgaagacatggctgccaacatttgcgtggtgtttagccacgccatcatagttaacaaagactacgccacagccgacattaatatcagtgcctaatgtggcatcgccaacataacttaaatggccaatcttcgtgcgatcgccaattttagcattcttcacttcacagaagttcccaacatggacgtcttcgccaatttcagcgtttgggcgtaaatgactgttaggcccaatgtttgaccccgtgtgcatgatagctgattcaatcgttgaacttgtgatttgaatgttgtcttcaattgttgaatcaataatagttgagccagcaccaacgaaacaatctgaaccaattgttgtgttcccttttaagacgacgttaggttcaacaattgtatcattaccaatctgaacgcccacttcgatataagtattttttggatcaattaatgtcacaccattacgcatgtgttctgtattgatgcgtttacgcatcacttttgttgctgcagcaagagcaactcgatcattaacacccattgattcttcaaagtttggcattctgtaagcagcgacaatttcgccttttttcttcaagatttcaaccacatccgttaagtagtattcaccttgtgcgttctcattcgtcacttcgtgcaaagcttggaataaggtcttgttgtcaaagcaataaacgcccgtattaatttcattaacagccgcttctttatcattagtatctttttgttcaacgattttttcgacaatcccgatatcattccggataatccggccgtaacctgttgggtctggggccgttgctgttaaaatcgttgcctttgcgcctttatcatggtggtatgcaaataatttttcaaaggtttcagcggttaaaagtggcgtatcgccactgaccacaatcgtaatgccatcttcatctttcagtaaagcttcagcttgtaaaaccgcatggccagtccctaattgttcagcttgtaatgcatattgtgaccggtcgccgagataatctttcaccttttcagcgccgtgcccaacaattgtgaccacattggttgggtgcgttctttcaacttgggttaaaacatgatctaccattggtcgaccacaaacctcatgtaatactttatataattttgacttcatgcgagtacctttacccgctgctaaaataattgcatttttattaaccatcataagctcctcgtcattcgtgattactggtctattttagcttaaatactaggctagagcaagctaatccgtattgaagtttagcgctttatcccgtatactggaggtactttattgcggaaggaagtcggccatgccaaaactgacaaacaacattcgattaatgctcggcagcatcattgttgccattgccttactagttggtgggtattggtctacctcagctcggcatcaaacacaccaagccgcagtcacgtcctctaccaaatcacaatcgcatgcgaggcaacaatcgataaaatcaaaaaaagcggctcacccgacaccaattgactggcgtgcgccttccgaaaacaaaccatatcctaatttagacgaacaacccgatttatgggtcgacgtttcaattgcacagcaacgtgtctaccttaaaaatggcaatgatcttttgtacacaatgcatgcttcgaccggttcccctgagtcacccacaccaactggtaccttctatatcgaagctgaacacggcgactcatttttcaatgcaaattccggggaaggtgccaaatattggcgctctttcctagatcatggtatttatctttttcacagtgtgcccacagatgaagctggcaatttcattccagaagaagcagagcaattaggcaaaaaagctaattcacacggctgtatccgtttatcagtagctgatgcccaatggttctataccgcaattccatataatacaaaagtcgtcattcactagcttgaatgacgactttttacttaataacgttcaaaaggagatgccctgatgactcagacaacccaaaaaacgattgccacggcttttaaacaattaatggttgaacaaccttttaataaaactagcgtcaccaccatcatgaataaaactggcattcgacgccaaaccttttatgactatttccctgataaatatgcgttattagattggatttacgatcaagaaatcggtgtctacatcgacgagcatctcagctatatccattggacacaggtgttggcgcaactatttaactacttcgatgctaaccgcgccttctatcaaaatgctttgtcgattgaagggcaaaacgccttcgaacgccattttattcatcacgtccaccaactgattaatcggattattcaagatcttgctagcgcccatcacattacgttatccaccgactaccaagcctttttacttagttttctttccaacgcattagttgcttacaccgctgaatggctccgcagtcgtcatccccaatcagtttcaaaagtaatcactgccctaaaaatgacattaactgatacaattaacggtttattattacggacaggacacttatatgaacaacggtaattataagataatcccatcaaaatttaatttcatatttattgaccattcttagcgtagttggcttccacgactgctttttctgcttgccaccagtcttcattatcacgataccagtcgatggtatgttgtaagcctgatttaaaatcagtgaattctggttgccagcctaattcttcccgtaacttcgttgaatcaatggcatagcgtaagtcatgacccggacggtctttaacttgatcataagcatctttgggttgccccattaattctaagattaattccaaaacatttttgttattttgttcgccatcggcaccgattaaataagtttcaccgattttacctttagttaagatggcccaaacagcgcttgagtggtcattcgtatgaatccaatcacgcacgttttgacctgaaccataaagcttaggacgaatgccacttaatacattagtaatttgacggggaataaatttttcgatgtgttggtatggaccgtagttgtttgaacagtttgaaatagtggcttgtagcccgaatgaacggacccaggcacgcactaataaatctgaactcgcttttgatgatgagtaagggctacttgggttataacgtgtttcaggtgtgaatttttcaccagcaccttcaccatgacctggtaagtcttcgcgcaatggtaaatcaccataaacttcatcagttgaaacgtggtggtaacgcacgttgtatttacgacaagcttcaatcaacgtatatgaaccgatgatgttcgtttgaatgaaaggtgatggatcttttaaagagttatcattatgactttctgcagcatagtgcacagccgcgtccgtcttttgaactaacttatcgactaattcagcgtcacagatgtcgccaaccactaattccacacggtctgctggtaaaccggctaagttagcgcgattgccagcgtaagttaatttatctaaaaccatcacgtgaacttctggatggttattcaccacataatgcacgaagttagaaccgataaagccggccccaccagtaacaataatatttttcaacctgaatcctcctaataatatgttaatcatagtattcattcttaatttatttaaatataacagcaatatctatttaatacatagcttaccgtattttaaaatcgcattaccgtcctcaacaatattttaaagttattactagttacattattaaaaatcatcttttcttttgaatattattctatataaaaaactgcttaaactcagtctccaaaacagacatcattttaagcagtttttacttcttatttaatcttcaacggtgctaattgggcttcaattgcagctaaatccgtccctgcttgcaacaatgccgctgccgtatagcaaccttcgattaaagcaacatcgtatagatgcaccgttttatccgttagttcttgggccaattcgaggttcatcttagcgctccctaagtcgtagaaggctaacaattcttgcccggcattggcttcaaaagcactttgaatcttcattgcgctagtcccaataccaccttcgtccgtgccaccagcagtcgttactgaaacatcagcggcaacttctttaattaaacgcgctacaccggccgcaatttctggtacgtgagaaacaatcacaacaccatattcactcatgataatacccccgccattaacattgtagtaaataaatacccactagaagccgcccctggatcaacatgtccgattgagcgttcaccgacataagatgcccgacctttggttgcttgcatatctttggtcgattcgacggcagcttcaattgcagccacatctaaagtaccatcttcaaccgctttgacaacgggagcccaaacgtcaatcaacgtcttttcaccaacttgtgcatgcccgcgtttttgaattccttctaaaccggctgccaataatgggccgacttcaagtgtcgtactgcttagttttgccatttctaaaaaggctgtcccatagagtggaccagaagccccaccaactttgctgatgagcatcatcgcagtcgttttcaaaataccttgtacatcggttggctgttgcttggtcaatgcttcatgcacagctaacaagccccgcgacatgttattaccgtgatcaccatcaccaatcggtgtatcaagttcacttagataatctttttcagcttgaatttttgcatcaaacaattcaagccatttcaatgtattttcaactgttaacatggtatctctcctttaccaaccaatcgttgtgactggttcatctaatttagcaacccaaccaggttcaattaatttcataattgttaatgacacaccggccatatctaaagaggtcatataattgccgacttttgtgaagtcgacttcaacattttcagcggccaagaggtccaagacatcattcataaagacgtattgttccatcagtggtgttgcacctaagccatttaccattaccgcaaaatgttcgccggccgtcatgtggtgggcttcttttaacttgccgactaattcagttgctaggtgtttcgaatcttgtaatttttcacggcgataacctggttcaccgtgaatccctacaccatattcaatctcatcaggcgctaattcaaaccccggttttccgacctcaggaacggttgcgccagataaggcgaccccgattgtcttaatattcggtgtaatttggtgcgctaattcttcaattgcttcgataccagcaccttgacgggcataagcacccagaatcttgtggacgaagattgtccccgcaacaccacggcgtccttgcgtatacgtactattttcaacagcaatgtcgtcatcaacaacgattgagcgaacgtcaatatcatccatagccgccatatccttcgccatttcaaaattcatcacatcgcctgaataattcttaatgactaagaacacaccacggcccgcgtcagctgctttaattgcttcataaatttgatcaggtgttggtgatgtaaagacttgtccgcacacagcggccgtcaacatgccatcgccgacaaaaccagcgtgcgttggttcatgaccactaccgcccccactgacaatcccgacttgtggccgatgttttaaatcggcgattttcatcactgcttctgttcctggaatttgtttgagttggtctggataactccgcactaaaccttggaccatctccgttacaatttggcttggatcattcattatttttttcatagtaacctcctcttaaatataacttcagtctatgttaccgctgtcatttatgcaacggacaaagcttggaaactgtccgaaagcacttcaaataaaaaaagcacccgcacaattaacctgtccgggtgctatcaaatcgtttaagctaagcgatctgcattctttgttaagtaattaccataactgacacttaacgttttattttcaatatcaactttatcaaccttcaagattgatgtgtaatcatcaaccatccgattgccttcgaaatctgattcagcaaagacagaaatgccaaccatttcagaatcaaactcttcaatcaagctcttcatcccattgacggtgccgccgcctttcatgaaatcatcgacaattaagactttggaattttcaggtaagctgcgctttgaaagttccatcttttcgatgcgagctgatgaaccagaaacatagttcacactgaccgttgaaccttcagtaatttttgaatcacggcgcacaattacaaatggcacatttaagtacatcgcaacgctctgtgcgattggaattccctttgttgcaacggtcataacagccgtcacttctttacccacatattggttggcgattaaacgcccaacttgccgtaatacttctggacgtccaagtaagtctgataaatagacgtaaccaccaggtaataagcgatcattttctgaaagccgttgtgccatctcagcgataaaagcttctgcttcatcttgtttaatcattggcatgtagcgcacaccaccagcagcgcccggaaccgtttctaagatccctgtgccacgattaaaaaaggtccgcttcacaattgataaatcttcactgattgatgacttagctgattcgtaacggtttgaaaagaatgtcaatggaatcaacgtatgtggtctttctaataaatagcgtgtcatatcgattaatcgatcgcttcttctaactttcatgttgaatacccctctatatattactttactgttatttccgaaaaaaactgtctaccaatcaattatatagaaatcttcggttaaatcctagtcttttttaaaaaaagagcttaattgttcgcttttatcccattaaagcgattcctacgccaattaaaaacgcctcaaccatttgattgtcggcgttttattatggtttcaatggtttaaccagatatacctcagcgcaaaatccggacatactattataaatccgttgagcccgtgaatactgactacagataccaaataccgttggaccactaccactcatctgagcaacatccgcaccaaactgcaataaccgctcacttaattgcttgataactggataacgttcagtcgtaatcggtgctaaaacattccccatattgcgagtcattgcatttaaatctccagcttcaacggctgcaaccagcgcctcagtttgtggatgctgttgaatctggtcgcaatccaatgcacgaataatccgcggcgtcgaaacactgacttccggtttcacgacaacgacccaaaaattcggtaatgacccgagtggtttgatctgatcgcctttgccagtgacaagggcggtttctccatatacgcaatatggcacatccgaatcaatttgtagccctaatcgcgccaattgttcgcgcgttaaaccaagttgccatagttcgtttaacccccgtaaaacagcggctgcatcagaacttccgccgcctaagccagccgcaactggaatatgcttatcaatttcaattaaagcaccggttggaatctgataggtgtgttgtaataattgagctgctttgtaggccaggttacgctgatcttctggcaaaaagccacttgatgtgcggacctcaattgcgggatcatcgcgtaatgttatctgaacatagtctgccaaatcaatcgacgtcatcaccatctgccactcaggttccccatcgtcatgtagaaagagtgcatctaaactgagattgattttagcaggtgctttttcaattcgttgcatcacattcaccttttacctagcatttaattgtttcattatactcatatctgcttgtaaaaaccaaccttttaacaatgcatccaaaaaagcactgacaatcatctgtcagtgctcttcagtcgacattattgattatcttttaccataatcttatgtctaaattcattcattaaatcaagcatctgcttggcattttccttaccaaacgtctccatccacgaggcaaaccgattatggatcttcggatttaattcttcaactgttttttgaccagacggcgttaaatttaaaatcaaccggcgccgatcatcgggatcaatttcttgtgtaatatagtctaatttaagtaaaacacgaatctgtcgagaaattgcaccgcgtgttacgcctcgttttttagcaatatcaattagactcactgaattatcatcagcaatctctttcataatcagatattgttcaaaagacaattggtaagcttgcgttggttcagaaaccaagtcttcgacatatttaatcgccgacatgtaaagttcaacgtattcatccaacaattgactatctttcacaatatttcccacctttttatttattttcttaactgtaccacaaatctttaagcttgactatttggtgtttgcgttaacttttgttttaactctccgccgaacaaaccggcgaagaacactgcacaaaagatcaccaagacgattaagactaaccaaagttgtgaaccattgccgttgacaacttgttcgaacccactaatcgtgtaagtccctggcaagaagattgccacaccacgatagaagcctgaaagcatgtcattcgggaagagtccccctgtaatgatgagttgtaagaacaataacccgaaggccattaaaattcccatcgttccaaaaagtttatccaatgctaaacatgcaagggtaaagaccgcactcgtcatcatacttaagacgaagaatgcgaacggttgtgcaatcgtcaatccaaaaaggtttgcaaagatatcaattaataaggcttgtgcgacaactacgccagctacaaccaacatccgttgcttaagtccactatgtgctaatgtttcaccatagcgataaagtgttaattgcgtcaacattgccccaacaaagaagacaagtgttaagactaatggcgagaaggtattaattaatgcgccatgatttgtatctgatagtaattgatctttgactggttgcacgaaatgttctacatttgcggaacctgttgaaagattggcaacttgcttgctaccatcgattaacttgacgtttaataagctaatcccagcacccgcttggcctaagccagtcgttaattgtccagcaccatctgccaataagcctgaaccctcgttaatttgtgtaatgccagaaacaagcgttggtgctttttggtttaattcttgtagaccatttgctaattgatggctaccattgttgagctgttggacgccactgccaagttgactttgtagtgtttgcaatccattattcaattgttggccaccatcattgagttgttgcacaccacttgccaaagctggtgtttgcccatttaatgtttgtagaccagcttttaattgttgaccaccattgttaagttgattgttattagcaactaattgattgctccccgtagctgcggttgaaacgccattcagataagttgtcaagcccggcatcaatccaggttgtcctaccttaccttttaatccttcctggatttgaactaatccatcatgaatcatgtcagcggcttgaatcccgcccattgtatcaactgtattgcctttttgtttcaagccagtatcgactttggctaaccccgctgtcagtgtatcaatcgcctgtgtggcaccatttagcgctaatggcgcttgatctttgcttgccatcttcgcaatgccagcttttaattgggccatattatcagcagtcttcgttaattcatcggatactgcttgtaattgaacacccgtatcactcatattattgcccatcgtgcctaagttggcttgaatggcttgcatgttctttcctgaagattctaattggctaccagcattgagtaagtcttttttagctgcaccgccaatcattattactctcaacgcgatagaagggttatcagccaagaatgttttaaatgtcggattgttttcggctagatcgtttaacttctgtaattgtgcaccagcatcttgtaagctgctcgcgacactatctgttttatcggtattgtatactttatcgttaatttgacttaaattagacccactatcttgtaaaagggcacccgtatttttcgtattatccgcaatcttcaataagtctgctttgataatttcggaattatcattattggaatggttaactttttgatctaactcttgaataccagcatttaaagcgcctaacccagccttcaattgtgttaattgttctttattaccatcaagactcgcttcgatttcatcagctgccgcggtcaacttttcgctcaactgcttggtgccatcagttaattggtcgacaccgccattgatttgttgcccaccagctaaaattgtttggttattggctgctaattggtttaaaccagcattaatttgaccagcgctagctgtataatctccaagcccagttgaaagttgcccagcaccagttgttaattgttggaccccactttgaagtggtgctgttttaccagctaattgttgtaagccacctgaaagttgtcctgaaccagtaacaagttgttggacaccagatcccgttttgtcagataattgttgtaagccatctgaaagctgacccgatccagttgttaattgttgcacgccacttgccaatggcgcactaccatctgccaattgttgtgtcccactatgcaacacatttaaattatcatagatttgttggctcccatttgataattgaccggctgctgtgtttaactttttaacgccattgctagcttcttgtacgccactgcctagcgtgccgattgcaccaagcaaggcttgattataagcttcttgaattttttgaacgacactgcccttcatttggttcacgacttgggttgtaatcatgccggccatgtagttatttttcttagacgtttcaacttttaacaagctgactttaggtgacttatctaacgcggttgtcgcatttttagaaaagtctttcggtaagacaacctgcatcgcgtatcggccgctagctaagttcgcttttgcatccttagcactgacaaattgccaatcaacctggtgatcattacgcaacgtttttagtacctgttgcccaactgccaccttttcccctttaaatgttgcggattgatcttgattcacaaccgcgactttcatatgtttaatattagtggtctgttcgtacttaataaaattaaatgtgattagtaatagtaaaatcggaattaagcagatcataataatgaacccacctaacttcactttgttctctttccaattgccaaacatattctttctccctttttgtatacgtcataatcattctatatgatattgttttatcaaacgaatgtcaacaactaatcaaccacgtgaagtatatggcgattcgtcaatctgctttttgaacaaaaaaagcactcaaccagttggttgagtgctactctattcttctattttaaactataggacaattggttcttcatcaaactcaatctcaatcgatttcgttaacaaatcagcatagctgtatgaaacacgttcaaaagcattttcatcctgatctaaatcgactacaaatactgctggaaaggtttctttaagaattccctttcgctttgtaacttttttgcgcccagcttgagcgacaaccattaacttgtctccgatatgcccatcgagaccgttcttaatattggcaagtgtggttggcattatgcttcacctcttcgagggatagtataccatataaacgaaaaatttgcaattataccattgtaccaacgatttggcaattacttacttagcttttttagcaaagattggctgattattcagcgcatcgcttaattgggcaaattgttggatactcaattgttcagcacgagcgctcggtgcaatctcgactgcttctaaggctgttgttaaagctgctttgacttcatcttgtttaccaaattgattttgcaagttattccataatgtctttcggcgttgtgcaaatgcgccacgaaccaattgatcaaataaggtttgattagcaactgttacaagcggtgctttgcgccccactaattcaacaatcgctgaatcaacattcggttgtggcataaaagctgtcttgggcacaataaaggctaagttcacttctgaatgaagttgaacggcaatacttaatgagccgtaagcctttgaaccaggttcagcgttgatccgttctgccacttccttttgcatcattaagaccatgcgatcaattggcaatcctgcttcaagtaagtgcaacatgattggcgtcgtaatgtaatagggtaagttcgcaacgattttgagattatgcttaccattaaattgttcggcgataatcgtttttaaatccgcttcaagaatatcttggtttaaaatcgtgacgttatggtagtgattcaaagtatcttttaagaccggcattaaccgttcatcaatttcaaaacttaatacttgatgcgcttttctggcaatttgttccgttaaagaaccgatcccggggccgatttcaatcacatcgtcatctttggtgatatcaccagcttcaacaatttgtttcaaaatggcgatgttggttaagaagttttggcctaagctctttttaaacttaaagccgtaacgtttgagaattttccgggtacgctcgggatttgcaatatcttccatattaatctcctaattcctgtttaatttgtaatagtgcagcgccaaattcagcttgcgtcacttggaacatcttgagacgcttgtaaagttgtttgctgttggtgtaaccaatgtgcaaaatttcgccgagtaattcgcgccgtcgctttgaatcagcccccgcaatcaagcccgccgttaataaatccgattgactgatttgttcgtctgcttcttcatcttgtgttaatagatgctcaagtgcttggacaatcgccgctggttttgcgtgttcaatgcctaaactgccgcctgctttttctggacgtgcttctgtccgtggtaaaaaggcgtgttcgacgcccggtacattttgagagatgattttacgaatcttctcgccatgaaaatcgggatcggtaaagacaatgaccccgcgtttttcttgagcgagcgcaattttttcgataatttcttcattgattgctgaaccgcgcgtttcgattgtcgaaacatctgggaaaacttcccgtaaccgcttcgtatcgtcgcgcccttcaacaacaatcacttcttgaattgtttttttcatagtgctcctaacttaaaaatccggtgggcattcgcatacgtcgctgccgcaatttcttctggtgccacatctctgagtttagcaatcgcttctaccacataccgtgtgtagcctggttgattctgcttaccacgataaggcgtcggcgttaaataaggtgcgtccgtttcaaccaacatcacgtccaatggacatgctttagctgcttcatggacttcatgcgcatttttaaaactgaccacaccgctgaacgaaatctgcatgccaagatccataaaccgtttcatccattcaacatcgccattaaaactgtggataatccccccacaatcacggacatctgtttcttttagaatcttgtacgtatcttctaacgcgtcccgcgtgtgcactgaaattggtatatgcaaggatttagcaatctcgatttgccgtgcaaaaacggtttgttgcacatcgcgtggcgaagtatcccaatgataatccaaaccaatttcacctagcgccactacttctggtcgttgtaattggtcagtcagcacggtttcttctgccttgtgataacctttggctgattcagggtgccaaccgataatggctgataaaggttcatattgcgctgctaagcgcaaagcgccctcatttaatactgtatctgaaccaacaatcgccatttcaacaacaccgagttcagcggcttgcgcgataaaatcagcttcttgccctgcatatggggtatcattcaaatgcgtatgtgaatcaaaaatttgcatttcaatctccttttagtgtcctcattctgacagttaaaacgtgctcttgccagtagctttctgcgctttgttacactttcaaaccggcgattccatcgccaattcgccaagttagacaaatgctcaaaagctaaccactggcaacacactcttttccattaaaaaggctaaaaggcctacagaatgtaaatgccttttagcccttttgacgtttctgttattttaaattaaccgatttgtgagccgttcaccaagttgtttggcacaactgctaattcaacttgtccgtcatgttctgctgataacaacatcccttggctcaattcgccacgcaatttacgtggtttcaagttcgtgacggctaagactttcttaccgactaacgcttcatagtctggatagaattcagcaatgccggaaacgatttggcgatcaccttgatccccagcatctagacggaatttcaatagtttatcagcgccttcaaccttggcaactgccttaatttcagcaacgcgaatttcggtttgatcgaaatcttcaaacttgatggcgtccttttcactgactaatgttgttgcttttggatcgaattcagctttggcttcagctgcttgttgcttagccttcactttttcgttcactaagcccgctttttgcgcttgacccatttgatccttaatatatgcgacttcttcatccaagtctaaacgtgggaagattggggtccctttagcaaccacttgaatattggctgggaatgtcccataaaccaattcacgttgcgcaacttgatcgaaatcaagccctaattgtgcaaacatatcgcgtggtgcatgcgtcatcacaggttgtaataagagcgcaacaatccgtaaactctcagccaagtgggctaagacactatcgagttccgctttgcggctgtcatcttttgccaagacccatggttctgtttcatcgatgtacttattcgcccggctgattaattgccaaacggtatctaaggcatcagagaacttcaattgatccattaagctggtatattgttcgattgtttctgtagctgtcttttgtaagtctgcatcaaatggtgtcacgtcagcttgatacgctggcactgccccattatcatacttgttaatcattgcaacggtccggttcaataagttgcctaaatcgttggcaagatcgtagttaatccggctgacaaagtcttccggtgtaaatgtcccatcattaccaaatggaatcgcgcgcattaaatagtaacgtaaagcatctagaccataacgttccactaacatttcaggataaactacgttgccttttgatttagacattttaccgtctttcatcaacaaccaaccatgaccaaaaatttgttttggtaatggcaagtctagagccatcaagaagattggccaataaatcgtatggaatcgtacgatttctttcccaactagatgcacatcagcaggccagtatttattaaacaattcgtcgttgtctaaaccgtacccaagcgctgtgatatagtttgataacgcatctaaccacacgtaaaccacgtgcttcggattacttgaaacgtgaattccccagtcaaatgagattcgagaaaccgataagtcttccaaaccaggtttgatgaagttattgatcatttcattacgccgtgacgccggttcgatgaaatctgggtgttcttcataataagccaataagcgatcagcatacttgctcatcttaaacttgtaagtttcttcagcgacccgttgaacttcatgaccagatggggctttcccaccgatcacattgccatcgtcgtctttataaacttctgctaattgtgattcagtgaagtattcttcatcagaaacagaataccaaccttcgtatttaccaagatagatatcgccttgcgctaataacttgtcgaagattttttgaaccgctttgacatggtattcatccgttgtccgaataaatttgtcatttgaaatttcaagagtttgccataatgccttgatgtctttagccatgccatcaacatattcttgtggggctaaatgcttttcagctgctttttgttcgagtttcaagccgtgttcgtccgtccccgtcaagaagaagacatcaaagcccatcaagcgtttataacgcgcgatgacatcggcggcgattgttgtatatgagttaccaatcgttaatttaccagatggataatagattggggtcgttacgtaaaatgttggttttgtctctgccattaggttcgctccttaattaaaaaaacgagaatcttaacaattctcgacttgcttaaataatgccatataagtaatcaaagtatagcacaaaagagcagtcatttaaacgacaactcacactaagccttcattaaaataaatcaatctgttcaggcgctttcggggctaaatcaggaaattctagcccaagtaattgttgtaattgcaaagcattatccgcagcatccccaccagaattattgttaaaaatcacggcaacttgttccgcttgatttttaatctgccgcacagcatccgcaaaaaattgtaattcatcttgatcatagcgatacaatgttcgttgcttccgccattgggcacccggattctgccacccggccatattacgaccatgcaggcgcaacatcgcaaacgccggattggtgacaaccggttcaaacggcacactgttcgtcggtgtttgtgcttcgtctgtgatgacgtgtgtcatgtttagctgcttcaaaaaggcgtacatctgttgcttaaaagcgtcatcgtaccaggattgatgccggaattcgacagcaattggcacatccggtaaccacgcgcgaatttgtcgtaaatattgactattttcctgattcagttgaaaaaatggcggaaactgaaataagaccgcctgtaattggccggccttaattagcggttcaattgattggcgataccgcacaaacaattctttttcagtactcgtaaactcggcgtagtcttcttggcgggtcattgcttggtgtgctttaacaatgaactgaaaactggctggtacttgcgtcaaccagtttgcgctgacggttggtgcgcgtaagccgtaataaaaactatcgacctccaccactggcagaaattgcgcgtagtcgtttaatgttaactgctttttgctgggcattaatgactgatgttctgaccaagtagttaatccaattgttatcatatccacacctctagaaccgttggaattgttgaatgaacaaagcttcttgttccgttaaatccttcaatgtgacaattaattgttgtcccatgcgtttataatttaaccgaatccgcgataggctaaagtcgatgactagcagcagcaacattaagctaatggcgcgcccctcagaaaacgccacccctaaaagctgtaccttgcccgttgcagttaagaatttaaaaataatgtataacgagaacagttcttcgacgactctaaaaaaacgaatcccttgcaacttcttctttaaaaccatcaagaccatcatcgtttggtcctttgtcatcatagtgcttcctctccttctcttggttcagtaatgggaattgcttcaaaaaaaatcatctgatctgcatgaaaatccgtgtcataccgattgagctgaccgcttaaaacagttggtaaaatggcctgtaagtctgccacaattccttgattatcagcagcttgtgcccattctggttcaaataattgaagcacgccttcgcgcattccgaccggataaagtggtagttgcaccgttggtaaaatatcgactaaaaaaatgtcaatcggtgcaatcgtttcaccgtcgatgtgccaatcaatccaccccgcattttggagtgtgtattggttggtttgtaaacccgtttcttcaaataactcccgttgcataccactgattggcgtctcatcgggttctgttttgccaccaatgccattccaaagcccagcaaatgggggcttaatccgattcaataatagtaaagtcccgcgatagcgaattaccgctaaattatagcgtcgtttagtcacagttcaatagcctcacatctcataaattagtttcattttagcatattaagcaaaagagtgctgactgtcgcggttagtaattgagcattaattcaaaaatagggattatggcgcccttcagccatgattgccatttttaggttaaccggaaaaggcagttcgaatcggcacgtttcaatcaaaaaagagcgctccgtctccgtttcgctctttccacattatttttcttctgcttctttcatcgccttcatcaattttacttgatattgtttcgaaattaaaattaacgtttggtataaatcccttacgtaatctgcgagtgctggatctttaaccgcagcaaggcgcgcatccatcaccgctttttcgcgttggatgtccgtcaagccgattttttgttcatgcttgattgttgcaatttgcttggtgacttgcatgcgttcttcaaataaaaccgccaattgggcatcaattgcatcaattttttgatagtgttcagttaacatgggctcactccttagttgctagtgcggcaaaaacgggtgtcgcatccgcttgtatcatagtgactggcatttcaaattgtaatgcctcttgattaatcgctactaattgggcatctggacggcgatattcaattaaacttgcaaatgggtacacacgaaatgacgtcccgaccacgacaattaaatccgccgcttcaatcgcctgaatcgaccgttcaatcaccgtcggatcaatcggttcttcatataaaacgatatttggtcgcaaaatcccaccacaatcttgatgatgcatatcctttaaataggcctgataaggcactgcttggccacacttttggcagctgacacggtataaactaccatgaaattcaatcacatcccgcgcgcctgcttttgtgtgcaacccatcaacattttgggtgataatctgccccttttgattcgcaatcgtcgccatcacttggtgaatgacatttgggtttgcttcaggaaaatacatctgctgcgtgacaaattcataaaaactggctggattggtgattaaattcgtgtgacttaataaatattctggattggcttgctgatgatacaaccccgttttcgatcgataatctggaatgccagaagccgttgacacgcccgcacccgtcaagaaaacaacatgctgtgccgcatgcaacattgatttaaaagtcatcaccatcactcctttttaacgtgcttttaattcgcagctttctgcgctttgctacatcagtcggccaatcgcctttggcgcttatccgtctgattaggcaagtgctcaaaagctaaccgcgaattaacgcactctgttctttaacgtgcttttcaagctaactttctgtgcttagcactgtgaatcaaatcatcgactgcgtcgctaattcgcttccctgtgctaatgctcaaaagttgaccagcttgaacgcactcattttcttaatgaatacggcattccaatttcatctaagaaggtttgcactgataaatcatacaatcgtttgaaatattccggtgttgccttgtcttctggaatccctaagacaaaagcattttgttgatcactcttaccaattccaacatacgctttttggttcgttgcggtcgcaaatagattttcggaatgtaaaatatcgtagacttggcgcacttctaatcgtagttgccgttcacttaataccggcgtcaatgtcaagagttgttggaggttcgtttcagcaaatcctagggttgataacacgcgatcaaacgcaacccacaagttaatcacagcccgccgtaatgtgaatggtgaatcaattgttttgcgtgccaacacatgatagagaatttcggcttgggcaaacgcaatcggataatcagccgtccactgttttaacagttgttggttgccaccatcaaagaagacgagggcatctaacagcgttaatacgcggaaaatcacccatctattttcgggatcgtctttttccggggtcagattatctcgtagaccttcaaggtaggcttgtttagtttcaacatccacaaagccatgggattcttgttctttttgaatcaccatgtgcacagcggcattgtacaaagttgtgccggtcgcaaccaattgttcatcgagttgcgcatcctgcgtggtgacatcggtcatgatttgtggaaaaccgattgataataatagtaagtgcaataattcgtgtgataaagcataatcggccgctgtcgcatcggtaattaagattgccaagctgccatcgttatttaaaacgcgttgtgcctgatcatgttttaacatcccagacgctgcatctgcgacccggatcttaatgggttgaggataattcttttgaacctggtcaattaaactttggatttctggggaaaattcagtagttgtcatttttggtctcctttgagtaaacagctttgcttttcatgataagccaaatccagttaaattaccaacggtttagaatgtatgaaagcggttaaaactgttataataaaggtaatcttaatttaaaggacgtgttgactatgacagaaccaaattcgcgaaaagtaattttataccttgctcagagtctagatggcttcatcgctgaaaaagatggtagtactgcttggttagctgcactcgattcatccgaatcagacgctgcaattcaagctttccaacgcaccgtcgataccgttgtgatggggcgtaagacatatgaacaaagtcttaaattagccggcacctatccttaccaagataaaaacggctatgtcttctcgaaaacgttacatgatacagaagatcgaacacatgtcgttgctgggaatattcctgagttcatgcgtcaattaaaaaaagaagatggcggcaatatctggcttgtgggtggtgcagaaatctttaccgaattgcttaaagcccagttagtcgatgaactcatcatcaccattgcgccagttctcctgggtgacggcatttcactggtcagcacgcacttaaccgatatgccattggaacttatcaatagccgtcaaatcggtcattttgttgaattgacatacaagattaattattaaaaatcaaacgaaaaggcagccacaatattttgtcgctgccttttcagattaaagtacgggggaatgaccaatgaaagccaaccttaaaatcccacttattttattcatcgctttatgtatcagcggcctctgccagctgttgcaccaagatttcttcgctgtgcttgtgatgctcatcgcaacaatcagttgtctgataattgcctttaaaaaccggcaagctagcggacgttaattcgcaacgcgctcataatcacgagcgtctgttctgtgctgatggtcgccccacgtaataattcgagcgtgaaagtcgctttttcgaattgattctgactgatatcgagattcttcaaattcgtgccagtcatatccatgccgttcaaacgattcccgatcattgttagccactgccaatcaacttgcccgagtgagacttcttgcatactgcaatctttaaagtcgacatgccgcatccgcgcaaagttaaagccggtgtaatccgcttggcaagtgtcgaacgtgacatcattcagaccagcctctgcaaaatcggaaccaatcaactggcaaccattaaacgcgactcgttggaagggatcattcgtcaacgaacagtttaacaacgcgcagtgttcgaattgcacatcttgaaaatcacagttattaaagtcgacttgttcaaactgacaatttttaaataaacagcctttaaagaataacatctcaacttcggtttgcttcaacgttagttcttcgaaaaacaaaccttcataagtctcatctggttcaaacgcagtaagctgtaccgtctcaagttgtggatttagccgcggtgcctgtgctttcttatctgtcatctaactgtctcctgtctattgtgattagtataccgaaaattgtcgccagtgacgacctgaaattcaggaaagccttttcttttcattaatggtactttgtggtaggttaaaagcatcaaataaaaggagtgattgatagtgcaaaaaatcaatgttggtggcagcggcttaatggcttcgccaattgtctggggtgtcatgcgcatcccacaactgagcgaccaagaagccctgacaatgctcgaaaccgcctatgaacatggaattaattactttgataacgctgatatttacggcgatggtgcttccgaaattaaattcgggaacgcccttaaggccagtcatattgaccgtgatcaagtgctcgttcaaaccaaagtcggcattggcaaaaaaatgtacgacttttcaaaggaacacatcatcgaaggtgttgaagccagcctcaaccgattacaacttgatcatgttgacaccttactgctccaccgacctgatccactcatggaaccggatgaaatcgctgaagccttcttaaaattgcaaaatagtggtaaagtccgccaattcggggtcagcaacttcaatcccggtcaagtcgacttactccaacaagcagtgccgcaagcattgattgctaatcaactccaattcagtttgatgcacactggtatgattgatgccggcgtgcataccaatatgcaagacgcgcgcagcattcatcacgatggtggtttattagaatactcacgcctcacgaatatgaccattcaagcatggagtccttatcaatacggcatgtttgaaggggtcttcatcgataatccgaaatttccagaattaaacgcagcactccaatcagttgccaaggcacatgacaccaacgtcaacgcaattgctagcgcatggctcctcagaattccagccagcatgcaagtcgttgtcggcacaatgaaccccggccgcctagcacaaatctgcgaagcagacaaagtcaccctcaccagaagagaatggtacgacctatacttggcagcaggcaatgacctgccataaagtgctgagatagccgtttatcacttgaagattagcctatcaccaggaattatggtggtttccggccatgatttttgttgtgtagtgaaccggaaggttatggctatcgaagcatgtttaaagtacgtttaaaacggttagtttctaagtaagtagtaattgtgcattaagcaaaaaaagcgccgtctcaattaatcttgagacggcgctttttttggttctacttaattctgataaggattgcctgcatactgatccaccaccgccatcgatccatcgtaatggccgcgaccggttgcatagtcaaattgcatcttaggttgtacattccaaacatacgcattaaagttcaacttcttatctgttgagattgcttgaacccagtaaccgcggggcatcaattcatctccacggaacacagttgtcacttggtaaatcacctttttattttgcgttagtgcttggcgaacctggtcttcaaaaatctgcatggtacgttgattgctgaagaccgtttgtgtcgctaagttcttcggattattgctactgccgagttcccctttttggaaaacaccatctcggttgaaattaaacgaaatcgcgtatgcaatcaaatggccgcgactttcaggaaagacccgttggccatcaatcatcacgggttgattatgccagccggttggttgccacgtttgacgatggcgtgtgtttgaacggcctaacgtctctttcgataagaaagccgtattagtcgttgtccgatttaaaccatccaacgcaccatacttgatccgttcggtttgccattgacggacatccaacgttgatttattatggttcacttctaaataggcattgtcgcctgacttaaaggtcttctcagccaagattgccgttgtttttttaacttgttttttatttgcaattgttggtgcattctcgtgcgttggttgactagattgtgtcgcctgacagccacccaacgccaacatggtcaacgataagccgaccaataaatactttttaaacatcctgttcctccctattcttacctgcttcacgacgcttcagttggtgcattgtcttgaaataggaactcaatagcaccaaacatgaaccaatccaagcgagtgggttggctaaacttgcgcccatgaagccgaattgctgcacgaggaagatcccggcaaaaatccgcatgaacaactccgcaatccccgctaaggttggaataaagctctgccccaaaccttgcaaggtgtagcgaatggcaaataagattgccaaaataaagtaacaactactgttaaagcggaagtagatttgtgctaaatccgtcacgtgcggttgattgttcccgataaacaggttaaccagtggtcgtccaaaggcaatgatcaacgcgcccatcactaaactaaagatgattgacaccattagtgtctggcggacccctttactgattcgtccaaattcacgtgcaccgtaattttgtgcggaatatgtcgccaaggtaatcccaaatgaattcccaacttgagttgctaattgatcaatcttcccagccgctgtgtaagcagcaaccgcgctagcacccaatgtattcaacatgatttggatcacgattgagccaattgcaataattgacgattgaaagcccatcggtaatccaaccttgagatgatccatgacatctttgcgcgtcacgcgaaaatccttcggccgtaaaacgaggaccggaatgcggcgataaatatatagtaagcataacacagccgcaattatttgtgcagagaccgtcgcaaacccggccccttcaacgcccatatgaaagcctaaaataaaaataaaatctaacacaatattcacaatgaccccaattactaagaaaaagaggggggttcgactatccccaagtgcgcgaatgatattcgaaagtaagttaaacgccatcgaggcaaaaatcccaccaaagataatcataataaaccgttgagcatcaacaatgatgctggccggcgtcttcatcatgaccaaaatatgtcgagcaaataatagactaataactgtcaaaatgatggttatcaccaaactaatcagaatgctcgtcgcaaagctgcgcttaacgccgcgatagtcttgagcaccatagcgttgggctgtcaagatggacaacccagccgtggtccctgtacaaaaaccgataatcagcatgttcaatccacccgttgagccaactgctgctaacgcattaacaccaattgtccgcccaacgattaaggtatcgatgacactatagagttgctgaaaaatattcccaatcaataatgggccggtaaataagataattaatttcaacggattacctttagttaaatcatgcatatcaattctcctttgctccatgttgataacttctcaaattacacaccaaaaacagcgtttacatctgtcttaaattgaattaagtctctcatattcaactttaaagtaccatcaaaaagcatctattatcccactatattagtctataaaaaaacagttaaacaagtcattcagcgacttgtttaactgtttttttaatttgaataggattagttaaagtaattaatccccattgcatcccgcacttctttaagggtttgttctgcaacagcattggccttcttgctaccttcttctaacatcttataaacggcttctggattcttttcaaattcagcacgacgttcacgaatgggtgcgaacttcgcttgtaagacttcgttcaagtaacgtttgatcttcacatcacccaaaccaccagcttgatattgcgctttgagttcagccactttttcacgatcatcatcgaaggcatctaaataggtaaagactgtgttgccttcaatgtgaccaggatcggttactttgatatgcaatggatcagtgtacattgacatcactttcttttcaagcgtttgggcatcgtctgataggtaaatcgcattgcctaatgacttactcatcttggcgttcccatctaaaccaggtaggcgtccttcgccttttggtgggaagaccccttctggttcaactaaaatttcttgtccgtaaacgttgttaaacgtccgtacgatttcacgggtttgttccaacattggttcttgatcatcaccaacaggaaccgtcgttgctttgaacgccgtgatatcagcagcttggctgactggataaattaaaaagcccgctggaatactttgttcaaaattcttttgttggatttcagctttcactgtggggttccgttgtaaacgcgaaaccgtcacaaggttcaaataatgcatcgttaattcgctcaaagcaggaatttgtgattgcacgaagacggttgttttagcgggatcaatcccaactgataaataatccaaagccacttgaaaaagactgttccggattttttcaggatcacgcgcattatcggttaaagcttgttgatcggcaatcatgataaatgtttcgtattcgcctgaatcttgcatcgctacccggttgcgtaatgaaccaatgtaatgcccaatgtgtaatttaccggttggtcgatcgccggttaagataatttttttgttcataataataccctccaatttaatttatcaactcaaaaaaagcgccctaattgtgattaaacaattaggacgcttctacgtggtaccacctaaattgcacgaaaatcatccgtgccactcacgcgataagggtgctacccgaattagttactcactaattcccgattgaaggcccaattcacaaccaacttcttgacgacttctcagtcccgccgcttcctgttcaagaaaatatcagttgctacttatccttcactttgtctgttgaattactgtcatactaacggattttaaaatgaatgtcaatcggtcgcttttttaccccaagacgcttataatataacaactaacaattggaggctgctatgttacacgaagacacaaaacaacaagaacaagcgcgcgttgaccgcacagttatacaggtcgaccaacgcctcacagtgattaaccaacaattggccaacgcctacaatgaaaccaaagacatcgaacaacgttacggcgacaatacgaaagtcaacattaccgaagtcgatgaccgcatggaaaccaacgccgcggtccaacaacaaaagcaattggtcgccgccgctgtcgaaaacgaaaaattactgactagccaacaagaacgcctgaccgatctcgtcaactccccttacttcggtcggattgacatcaccgaagatggtgaaacggaatcactctacatcgggaccgccacttttatcgacgaccaagacaatttcttaatctacgactggcgcgcccctgtttcgagtatctactataatgggacactcggtccagtgacttatgagacgccaaatggccctgtcaaagttgacctcaaactcaaacgccaattcaagattcaaaacggtcaaatcgaacacgtctttgatacgaacgaaactgtcggcgatgaactcttacaagccgtcctcggtgaacaaagtgacgaatacatgcaaaacatcgttgccacgattcaaaaagaacaaaatgatatcattcgcgatacaaccgctgacttactgattgtccaaggagtcgccggtagtggtaaaacctcagctgtcttgcaacgcatcgcctttttactctatcacagccgcagtcagctcgaagccgaccaaatggtgctcttctcacccaaccgtttattcagccattatatttcagaagtcctgcctagtttaggcgagaaaaacatgcgccaagtgacgatggccgagttcttaagtcatcgcttctcaggcttacaggttgagaacctcttcgaccgcttcgaaaaagatcaagccagttttcctgaaatgacacaagccatgcgccggtataaagaaagcacagcgttcatgcacgcaattgaagcttacgttaaacaagcctcaacccaaccgttggcattcaacgatctatacttcgaagaccgcccattttttactaaagaccagatgaatcagatttatctcgcgctccccgcaaatatgttacccggcgacaaattcctcgccactaaaaacacgctcatcaaacggcttaaacgccaaatcaacctcgaagttcatctcgactgggtcgctgaaaaaatcgataccttaaccgatgatgcttaccggacgattgtcggtgaccgcgaattcgattctggcgatgatgaacaagctttcatcgctcgtgaaatcgttcaaagttatttcgccccactctatgaatcaatctacaatgattatttcctagatgaatccacagaatatcaacacttcttaagtggtgcttgccctgccgacatccctacgaaggtttgggacgccatgattcgccaagtcgcggataacaatgaacgccacatcgtcgggctcagtgacgccgccccaattctatacctgcgcgacttattaactgacagcggccaaaatcacggcattcagtacctcttcatcgatgaaatgcaggattacagcatcgctcagttcgtctacatccaccacgcctttcccaacgcgaaattaaccgtgctcggcgattacgcacaggatgtcttcacggcgacctaccaaaccggccacttcatcgatcaactgaccgctgcttttccccgcttaaaaatcaaccaaattagcttaaccaagagttaccgcgcgaccgccccaatcaccaacttcgccaaggcactcttgccaaaagaaacagccctccaagccttcagccgtgacgggcgcctaccgcgcgtcattgagacgccaaacgaccaagcgctcgctacactgacccaagaaatccgccatctccaggcagaacacgcgaccgttgcgatcctcaccaagaaccaacaagttgcccaccaactctacgctagtttaacacctgatgaacacgtcacactcatcggtgaaacaacccgtagtttacccaaaggcatcctaatccttccattatacttagccaaagggctcgagttcgacgctgtgattggctacgacatctctaagaagaccttcggcgcacaatcagacgtagatctcctctacacactcgtcacacgtgctatgcacgatttaacactgattggcgtggatcagctcagtccgttgatagtggcactgccgacggacatctatactaccttacaatcaactaagcaatccatttaagcaaaaaagcctgtcgaaattatcgacaggctttttgaattcgtattttatgcaccgtatggaaaatccaaaccagggactgcatttaaacttagatcagcaaattgttgtttttgtaattcgatatgcgctgcggccccgatcatggcgccgttatcgccgcataatcgaagtggtggcatgatgaggtctaaatccattccggatgccttaatggctgtcgccaaaccttcacgtaaaccttgattggcagccaccccaccggccacaacgagttggcgcacgtttaattgacgcgcggcgtgcatcgttttagtggtgagcacttcgaccacactcgcttggaaactagcggctaagtcttcgtggttcagcgtctcaccgatttgatcggcatggtgcactgtgttaatgaaggcactcttcaaaccactaaagctgaagtcaagattatcttccttgagcatcgcacgcgggaatttaaatgtatcttgacctaagtgggcaagccgatcgatttctttaccagctgggtattgaatcccgaggacgcgaccaattttatcgtaggcttcacctgctgcgtcatcccgtgtatcaccgataatttcgaattcgccggcggctggcatgtacaccaattcagtatggccacctgaaaccagtaaagctaacaatgggtattctaaaggcttaacaaaccgcgccgcataaatatgccccgccatatgattgactggaatcaatggtaagtggtgtgcgtaagcaatcgctttggcagctgtcacgccaattaataaggcgccgactaatccaggcccataagtgactgcgaccgccgttaaatcagcgtaagtaaccccggcctcttctaaagccgcttgtgtacaaactgtgatttgttcaacgtgatggcgactggccacttcgggtaccaccccaccaaaacgttgatgactcttaatttgggtagcaatgatgttgcttaaaataacatgaccgtcttcgatgacggccacactcgtttcatcacaactggattcaaatgctaaaattaattctcgtttttccgacatgactgactcctattgactcaatatccgacacatactgaatgcatcttctttttcctgaatgtaataattgggacgcgtccgcaccactgtaaaacccaatcgctgataaacggcttgagcgcttgtgttgctggcgcgtacttctagtgtaattttttgactgggataatcgtgggctaaactaaccatttcgtgcaccaaaaagtggccaataccacgtttttgataacttggccgcaccgcgatattcgtaatatgagcttcattggttgaaaaccatgcaccgacaaacgctacgacttcagtcccttggcataaaaccagatacaacgatgtcttgcgcttgctcaactcactagtgaaggtccaacgatcccacggcgtctgaccggcatagaccgaccgttcaatgtccaacaatgccgtaatatcattttgactcgcgcgtgctaagtaaaatgtcgtctcatcaatttcaacgcgccgagttgtgtaaggcatttctttcttgacccaaatctggggtttgaggtattccctaaacttgttccacatacgaatcagcgcctcgctcatcatgcgtttttgcccagttaacttctgcttccgtcttgcgtaaataaacgggtccgaagccatggatatccgcgacaggttcagccatcaagcctaattcacccaagacgctggcgtgcggtaaattatggttggcggacacgaaatgcgcgttactacctaatgcagcttgaatctgttcgttaaagtgtgcaacgtcattccccacaaaataaacaggttctgccaataattgtaattgtgccagtagtgcttctagtgaaacgtgttgatcggccacaacggtttgcaatgtcccattttgccactgataaatccccgcgaaaacattgtcgcggcgtgcatcaaacagcggtacaatcaaggcggtcgtatccatcacattggccgctagcaatgctaaactcgaaatcccgaccaatgacttattaagcgtccaagcaaaagacttagccgttgtcaccgcaatccgcaatcccgtgtatgaacccggaccttctgcaacgacaaagcgatcgatatcttcaatggtggtttttgtttgttttaatagttgatcaatcattggaagtaacgtctgactatgtgtttgacgaatattaacagtcatttcgcctaaaatttgatgatcttcaaggagtgccacactcaccgcttgattcgaggtatccattgccaatagcttcattatttcatccttcttctgcttataatccttgttattctagcataaaaagccggtttccacaaaaaaaggcgttatcttcaaatagataacacctactcatttataatactctatcttttaatctaataatcggttcgaaatgcatcacgatgtatagaataatcggatgaatcactaatgtggcagcttccccaatggcccgcgccgtaaagtggaacccaaatggtgtatgactaataatcgacacccaccatgaattcaaaccgaggttaacgattagcacaactgtcacaacggcggcaatcacgcgccaccatgtaatcttttgtcggtagaagtaacacccatagatgaaagcccctagaaacgctgaaagtgtgaagcctgggaaataaccacctgggaccccaatcatcaaactattgatgaggtcgccaataacggcggcaagtcccgcccaaactgggccaaaccaccaccccattaaggcggtgacgatgaatccaaaactaattctgaaaatcgttagtgaaattgcaaagcgtgcaaccaccaattgtaaagcaattaaaacagctagtaaaacaacgcgtctagtgtctagcttaacaccaaaaatctgaccattaaccataaaaagcatctcccttttggagctgccacaaataatactgcggcgaatgcggtactgaaatcgcaagcattgctgcttttcgtctggtgtccacattccgttccaccagcacttaacgcttcagtcctactccgaatttttagaaccccttaaatgtatcactaacgttatttaattacaagcaattgattttcatttttcagcaactcttgcagaaaatttgctatacttacagatgagtaattcggatttaaagaaaggtgttcattaaacatgaagaaaattttagtcctccatactggtggcacaatcgcaatgtctgcggacgaagatggcgcggttgcacccacagatcaaaatccaatggccggctttgaaaagctgttcgataatcaattaatcattgaaagtgaagagttcgccaatcttccttcaccacacatcacacccgctgtgatgttaaaccttaagaatcgaattcaacaagctgaagaagacgggattgatggtgttgttgtcacacacgggacggataccctcgaagagaccgcctatttcttagacttgacacttcccaacaatatccccgtcgtcgtgactggtgcgatgcgctcgtcgaatgaaatcggcgcagacggattacacaacttgattagtgccgtttggacagccgcttctgacgatgctcatgataaaggtgtgctagtcgtgatgaacgatgagattcacacagcacggtatgtcacgaagacgcacacgacgaacgtcgcaacctttagaacgccaacttttggtcccatcggtttggtcagcaaacacaatgcgaatttcttccaagaattaattcgttctgaaatttgcgacatcaaaacccttgtcgaacctgtttatcttttaaaagcatacgctggcatggatgggactttattcgacgccatcaaccaacccaacaccaaagggctcgttatcgaagcactcggggctggtaacttaccaccagcaaccttacccgctgttcaagcgctattagatcgcaacatccccatcgtacttgtttctcgctgtttcaacgggattgccgaagacgtctacgattaccaaggcggcggtgtaaagcttaaacaaatgggcgtcaccttctgccaaggcctcaatggaccaaaagcacgcctcaaactacaagtcggcctcagcgcaggcaaaacaggcgcagcattaaaagaatttgtcagcaacgcaacatcatagagtgcgtcatcaacggttagcttctgagcacttgcctaacttagcgaattgacgctgtaagcgccgatttgataagtgtagcaaagcgcaggaagctgttgatgaaaacacgttttcgatagagtgcgtttgaaacggttagcttctgagcattaactggatttgccgaattggcgatgaaatcgccgatttggtaaattgggttaagcgcagggagctgtttcaaaaagcacgtttcaataaatattcgaagataacaaaagaaagcccatcacaactttatctgtgaatggggctttctttcgtttaaacgtgcttcctcgaactgccttttccggttaactgaataattgggattatggctaagacccgccataatcccaattatcccgttaatcctcaaagccaacccgttcgactcagcgctctttccacgtaatttccgcttctgctgcacttaggtcatccacggcgactttatgccgtgttgtgattatatcatcaactgtgagttgttcgaccatgctttgggtcatttgaccgtattgaatttcgtggccgtagcggatgttgacacttgctacgcggtgtgtcgtcaagaagtcataatcgagcgcatccaacatccattcaaaataatggacgttattaacgtgttgattaccatcaatatcgaaataacgcacacgatattctttggtcgtcacttgttcgggatcaatcttcttaatccgtgggaatcgtttgctacctttaatctcacttgactcgaatggtgccatgatttccggcacaacttgcaccatactccgtgtttcatacgacatcatcacgaagatgctttggacgaagacgcattcgttgccggcttcatcatataaccagaaattccggtaacagaaatacttgttgtaactctcagcttcagtcacaattttaactttttcatccaccttcggcatccgcgtaatcttcatttgatactgcgtgaccacccaaccaagattgagcgcatgcattgtcgcttcaccgacgttgagcgcattaagttgatgctctgatgctaaaattaaaatgttcaccaaggatgcaagcgttaattcgcccttgatatccgtttcgaaatacggaatttgatagttttctgaatattgctttcctggcatggcgtgacctctattctgttaattcgtggtaggcattataaacgacttgctttttcaagccatttgccttagcgaccgtcttaatcgccacgttggggcttgctccttgttgaatctgggcttccacttgttcaggaagggatagcgattccgttgcaactgcactgaccgttgcatctggtgctggatttccagcaactatcatcacaaattcaccacgtaattctgtttcagtcgcccaagcaagcacttcttctaggtcgccacgaatgaattcttcgaacttcttcgtgagttcgcgccccaaggtgactttacgatcggcgccaaacgtactaagcaaagcttgcaacgtctttttcaaacgatgcggtgcttcatagaagataagtgcttcaggcttttgtgccaacgtcgttacggcttccgttaactccttgcctttacgaggcaaaaaaccgtagaacgtaaacggttgtggtgtgatgcccgaagcaatcaacgctgtaatcccggcattggctccaggtaatggcaccactgaaatgcccgcttcaatacaagctttaacgagctcatgaccgggatcactaatcgatggcatccccgcatcactaacttgtgcaatatcgtcaccggcttctaatttttcaatcagcgtttcaatccgttgttgcgtattgtgttcgtggaaactaatttgtttcgtttcaatctcaaagtggttcaataacttctgcgtatttcgtgtatcttcagcagcaatcagtgcgaccgatttcaatgtatcgattgcccggtaagtcatatcgcctaagttcccgatgggggttggtactaaaaataaagttcccgtttccgtcgttttaaaacttgattgtgtttgcatgttctatcctttcaagatgcatcaataatgacataaagacaggccaaaagtaagcatcccttttgccctgccttttttaatcgtttgttcgttcgccgtagatgacatcattacaaaatgcgcaaggctcgttattttcgcgtcgtgacccataaaaatacgggcagatatggaagccttcttcgtaaagattctgtaagttttgttttgatttcgaaagggcttgagccccttccttacccgtttgcggggtggctgatggttccaattcttgcaaatgttcccgcaagtgcttgttttcaatctttaattcagcgtttttctcaaggacttcggcaaggactgctttcatttcactgagcccctcaaacgtcaatttagcttgctgttcaatgtctgataactgttcatataagtctttactcaccgttgatatcctcccgatacgctggttatgcgttttactatgcaattaactttaacgttaaactctctaagacgttttggcaactaatattttgttcaaaaatgcgttgtgcttgtaaagcatattccgtctgagcgaccaactgcgtggtagtcaacgcggcgctggcctggtttaactggctttcgtacgcaccaaaacaaggtgtggcgcctaattcatagcggtaattcaataaatcttgataccataagcccaccaaagttaaaaaggtcttctgctgttggcgatcaactaataatggtaaaatttgcgtctgaatctgcacaaatgcttctaaatcacgttgttcaactttttgtgcccacgcggcaagcttcgcactgacttgtaatagccaatcatccgccaataaggtctgtgcttcagttaagtcacttgtcaaatacaccaataactgcgcttgttgtggcaaaataccagctgcttcaaactgttgttgcaccatttgtggtgccaatgctgccagatcaatcacttgaagccgtgataaaatcgtggggagcatttgatttttattactcgtacataaaatcgcgtaaacattttgcgccggttcttccaagaacttcaacaaactattagccgcgctggcggttaacgtttcagcagcttcaataatgaataagcgttgactggattccatcccgctcttagccacttcttgtttcaaatagcgaatatcggcaatcttaatactcttaccttccggcttaatttcaatgacatccggatgattatgcgtcaaaatccgctgacattccggacatgtccgacaaggttgcccatctggtgtcacttgttgacagaacagacgcagtgccaaccactgtgccaattgtgtcttccccaatccctgtgcaccagctaatagataaccatgcgccatctgtccacgcgcgataatctgggcaaactgggccacaagtttgggttgaagctgttcaattgttaaactggccatcgattagaagcggtggaactgttcaatcggcatcacaaagacggttgccccaccgacttgcacttcaatcggatatgacattgagctatccatcgtggcatccatattaacaggcggtgtcatgaattgttcgcgtgcctgacacgttttttcaataatcttaagcgcttcaggaacccgttcgtcttcaattccgacgataaacgttgtattcccagattttaagaagccaccagtcgttgacaacttggttgcccgaatgttggcatcgattaattcgctgcttaataagttgctatctttatcttgaacaattgctaaaagtaatttcatttcaatctccccttttctatgctgtgaataagtctggatatcgttgttcaatcacttgcagacatttggcaacaactatgtctaagtctgcggtcgcatcaatcgtttgaatccgctctggattatcttgcgcaagttgtaagtaggattgccgaactttttggtgaaaagccaacttctcttggtccaatcgatcatattgatcctgtcgattctgtttaatccgttgtaaaccgacttcagatggtacatcaaggtataacgttaaatcgggcgctaatccattagtggcaaataagttcatttgcgcaacggcttcctcaccgatgccacgacctgccccttgataagcgattgaactatccacaaatcgatcacaaatcacgattttgttatcagccaacgctggttcaatcttttcaacaatgtgttgtcgccgagcggcagcgtataacagtgcttcggtgcggtcatccattgccgtattttcaacatctaaaatgacattgcgaatcttttcggcaatcggattgccacctggttcgcgcgtaacaatgatgtcttggttgcacttggattcaagtagcggtacaacagccatcaacgcacttgtcttaccagcaccatccggcccttcaaacgtaattaattttcctaccacaaaacaaccttcttcatccatagagttacttccattttacttgattcaacaaaagacgtaaagggaagagtgcgtatccggcggttatgttcttgcgtttagcgtgcgacagcagacgtttgaaacaaaaaaagacaaagtcactcgaccttgtcttcacgctgcggctgtcatctgaatgcccgcgctatctaaatgtatttctagttgctgcttctttcgaaactgcttcacctgctactttacgttggcgggcttggcggaataagaattcaaactttgcttgttgaatcttactttccatctctaattggtcatcgagtccgcggacgttgtcttgcgtcttttgggccatctgccacttatctttgacttggtacactaaatccaataaggcttgatcacctaattgttttaatgtcggtttttttctaccaaacatcgcaaacccaccattcttaaatttcttgacgcccttcaaccgcttttaacaacgtcatttcatctgcgtattcaatatcgctaccgactgataaaccgtgcgccaaacgcgtcactttaatcccagctggtttaatcaaccgcgaaatatacattgccgttgcttccccttccggtgttgcattagtagcaatgataacttctttagccggtgttttttgcaatcgtttaatcaagttggcgatgttaatatcatcgggtcccttgccttcaatcggtgataacaccccatgcaagacatggtagagcccatgataatcattcatccgttccatcgacatgacatctttcggttgttcaaccactaagatcatgtcttgactccgcgttgtatcgcgacaaatttcgcacgggtcttcatccgtaatgttgccacagacactacaataatgcagatcacgacgtgccgaaattaagttcttggcgaaattcgtcacatcgtcttcattcatatcaatcgtgtaaaaagctaatcgggttgcggtcttgttcccaatcccaggtaacttcatgtagctttcgatcagcttcgcaattggttctggatattgcatcaatgcacttccttaatgtctcacttaaaatgggaggcctttagtaaatttacccatttgggcttgtgtttgtttatcgatttcagtcatcgcttcgttagttgccatgataatgaggtcttgtaacatatcaacatcatctggatcgatggcctctggtttaatggcaatgtctttcatcttcttgtcgccagtcattgtgaccacgactaaatcgttggctgctttgccgacaaattctgtattgttgagggcttcttgtgtttgccccatttctttttgcatcttttgcatttgtttcatcataccttgcatattacccattccgcgcatcttcattacttcctttcaaatttaaacgttaatcttttttaacaaccaccgcatcgccaaacaaagcttgtgcttgttcgacaacggccggtttttcttctggtttcggcgttgcttctgcttcgtcatcagttgttacctgttgacttggtactgcgtgattctgtaaatattcctggcgaatttctggccaaacatcgtggggcactaaaaccaccttgaaggggttgccagtcaaacgattcaagccgttttctaaaatgttcaaaagatcttgatcattgctagctcgctcgaataaaatcgcgtagttaaacgcgacgacaacgccactttgactcgccgcaaccggttcggaaaccttcatcacggcgcgcttggtaacgtccaacatattcaacagatccggccagacttctttgagattctccaaattggtccgcgtcgcatctgccaataccggataaatcgccttacggttgacctttttactaatcttcttagcaggtttggcctttggcttggcagctggtgcactcactggtcccgccgcttccaatttttgtaacgccgcttgtaattgtgcaacttgttgactcaacgctgcgacttgttcattatcagcagctggtgcggcaaccatcgtagtcgttacttgggctgtctggacttgcgtcaagcggaccgttgcgacttccagatagatttctggatggttcgtgaaacgcaattgctgttgcgtttcattcaggatatcaatcaccccgtacaaacggtcagccggcatcgctgcactgagcgctttgaagtgttcatccaatagatccatttcacttgcggcgactaattcgggtgcttgttgatacaacagtaagtcgcgcacatattcaattaagtcttccacaaaacgttgggcatctttaccttcagccaaaatctgttgcaacaattgcaacgcttgtttaggcgcattatcctgaattgtttggacataatccgccaacaacgcttcggttaagctgcctgtcacatccaacgcattatccaacgtgacgtgattgtcgctaaaggataacacttgatcgagaatacttaaagcatcccgcatcccaccttcagcagctttggcaatcactttcagagctgctggatcataggtcatttccttttgatctaaaatataagccattcgcttaaataaatcagcggccgtgatccgcttaaaattaaagcgttgcgtccgcgaaatgatggttgctggcaccttgtgaacttccgttgttgcgaggatgaataccacatttgttggtggttcttccaacgtcttcaacagtgcattgaacgcaccagtggataacatgtggacttcatcaatgatgtaaattttataatcagcttgggtcggcgcatatttggccttatcccgaatatcacgaatctcttcgaccccattattagacgccgcatcaatttcaatcacatcattgagggcgccagccgtaatggcccgacatgtctcacattcattacatggttcgccatctttttgataatgacagttaattgccttggcaaaaatcttggcagccgatgttttccctgttccacgtgggcctgtaaataaataagcatgacttgtttggtgcgtcataatggcatttttcaatgtttgggtcattgtttcttgcccaatcacgtcatcgaaacgctgcgggcgccaaacccggtataaagcttgatagctcatttaatgacctccacctttgcaatttaaagtccgattcatttaaaactacttgttccattttagcatattttaccgtcaattttgattgcgttgcatgaaaaaagacccaaccgacaaaattaattgtccgttgggtctggttaattttcacaaaacttaagacacatgataaaacaaacttagtgctgctttcttccgaacctgacacgattcgtaggctcatcattgtctcaaggcctttcggcaattcctattctacctgattcaagcattaattaccagccattttcttttttttacggcgattttcgcgaatctttctaaaaaaagtctgcaataaactcgcacattcagcttctcgcaccccgccaaccacttcagcttggtgattgaaccgtttgtcagttaataaattcatcaacgtgccggtcacaccagccttaggatcactcgcgccaaaataaactttgggaatccggctattgataatcgcgcctgcacacattgggcatggttctaacgtgacataaatcgcggtatcttccagacgccaactcttttcaaccatacaggcttcttgaatcgcgagaatttcagcatgtaacgtcgcatcttgcgcgtgttcgcgaatgttatgcccccgtccaataatttgtccgtctttaacaatcacggcgccaatcggtacctcgccaatgatgcgtgcttggttagcttcatcgatggcggcttgcatccattgatcgatctcttgttgtgtttcactcacgcgttagtcgcccctttattttacttctcaactattaaaacacagtcgcgctagtcgagcaattaaaaatggtgccgacggattgtcgataccatttttaattgctccataagccatcctcttccgtttaactgcaaaatgagcattatggcaaggactgccataatgctcatttcactgttaatgctcaaagcctgaccaactcgagtcgcactctatagtttttctttcacctttgttgcgtaagccattagtgtttggcgcaaatcatccatcatatctggtagattgtctgcgtgttctccgagcttatcttttaattgggttaacctgtctgccgcagtcaacaagttattcacatccgcatcggagagttgatcgaccaactctaacgccttttgattaccatgtaatttgtcttttacaaaacttttaactgctaatcgtttgcgatagcgcgatactttatcgattactgccttagaaccgacaaaagcggtcgttgcgccaactgctgcagtcacccctacgccgattaaaattttatatctggttttcatcgtatcaacctccttgtactttaatcatagtttagcacaattcgcctgaatttaccgctttcaaccccggtccttactttaatttaatactttggagaatgtaataccccttatccttatgaataatttgcacgttgccaaaaatgctcatcatcgttttcttcgctgatggggcaccttgtttcttttggatcacaacgttcaattcaccatctggtaataagtgatcataggcaccagtcaaaatattttgcaccacatcttttcccgctctgattggtgggttggtgaagatggcggcgtattgatccgttacgttttgatattcagctgattcgaatacagtaacgttggtaatctgattcaattcactgttcttacgtgccaaatccaatgcccgttcattcacatcgaccatgtcgattcggcgctctggtgcgagcttagcaatcgtcatcccgattggcccgtatccacaccccatatcaagcactggaccagctggcgcttcactcagatcgaccgctgctagcaatgcccgtgaaccgtaatcaacagtgcttttagagaataccccgttatccgttgtaaatttaaaattaaagccgtgtaattcaaacgtccattgccgctcagcgtgttcaacgtctggatttttagaatagtaatactctgtcatcttttttcctcatttgtcgttagttatctgaaaatttcccaatttgaactgacttcatcaaacgacctagcaagccaccaggatgcggttgatccgcaacccgttgattaacgaccattaaaacttgaaccatcgtgaaaattaatgaggtccgtttttgataagcgatatatttcgaacgccattccgtcgtatatttcttcttataggtccgtaatccctggaatccgtagaagtgatagccgtattcatagatcagatgagcgattcgttcttcaataaagctaaactcggaagtccctacatttgcaagaggcgccatgccgaggttgaagtacgtgtagccatccgttcgattttgttcaaagagattaataaagatctcatccattataccagatggcgcgtcttgtctgtgacgcattagatcaatacttgcgacttctttggttcctgttggcatttcgttagcgaaagcaattaattggtgatcggcattatagacaactgcaattggggctttttggaggtatgcttcatcgaaaaagcctaacgagaagcctttttcaacgcgactacccaaccaatcatcagaaaccgctttgagttctgccattaattcggcactaaatggtgggtttaaaatttcaaattgatagccttcacgttcaaacttattcattaaggcgcgttcagcccgccgtttcttaccagtcatcgtgaagtccgccaaacggacgtagccttcttcaccaaacttgataaagtcaaacccgatttcatgcagttgcatcgttaattcacttgaaatttcgtagaacgctaaatgacaatcaatcaaatcagcgtcgtgcatcatctgttcaattgccggtaaaattttagccggatttccgactggttcacccattacaattaagcgatccgcttttttacgataaagcaagaatacctgatcttctccttcttcctgatagaaataaactgatttatcccgtaagtatgccaaatgactgacctcattgccgccgtaagtgttaatcacgttagcaattcgtgcttcatcatatggcgctgctattgaacggccccctcgactgagataacggtagacgagatataaggtccctgcggcaaccaacatcccgataaaaccagccaaccagactctttcggatggaaataaaagcgctgttggtacgggtttgcgatgccgtaagtgtggcgaattggcaatcccaacaaagccgtataacaagaaggcgcccacgaaaagtacaccatccacaatccgatcattccatgaaaattcgatccgttcacggtataattcgcgtttcaataagaaactagctacgagcacaaaagttaaaaagacagcgagtttgattgagaaatcccgccatagtgtattggtaatcgcaatcaccaatagcaccatcaacggccagaaaactttttgaacgcggttggcaacgccgcgggctaaggccaacatgacaaacgctacaatgatgtttgtcacacgatctaagaagaagaacgtgtatgggtagagctgtccaatcactgtgttggtaatcgcaaagttcgggacagttgctactaataatagaatgatgcttgaaatataaaggaagaaaacaatgaagtgatgagcgattttttgcatcacctgccgaggtaagccctgtaaataatgatttaaccggctgcctgcatcgtgagtaaataaaccaacgccgactaaaaacggcacgatgtaataaaagactcggtaaaatgacaaccagacaacggcgtccgcattttgaacgccgactgcactcagaccaaagatcatgaacaaatcaaacgttcctaagccccctggtaccatcgaaataacaccaatgatgttggcaatcatgaaaagtggtaagacttgtaataagtcacccttaatctctaagaaataaccaatcgttaagaaaaagccgcccgcaaaaccccattctaagaaagaccctaatgttaggcgtaaaacgcgttgcatcgaaagatctttgaaaaaggccgcatttttaaagcgcgtactaatcatcagaccagggaaatacaacgaaccgcccactagccataaccagtagttggcatacatcccaccaataccaaagccaaagatcaaaacgacactaatcagacaccagattgacaggccggctaataagaacagcgcaatttttgaaatcgcaattaagatttctttttgtgacgcttttttaccatagaaattggcccgtaaactcgcacctaagaagcccccgaatccggcaatgttcgtaaacgtattgacgatccaaccagatttgactttataccagaatgaatagtcctccggcagcaactccgcaatcacgaaatcataattgagcattggcaagaccgccacaaacccaatcaccagcatcgctagcaaggtccacggactttgtgtcgttaaactcgctttcaattgttccccgttcaagtcccggaaaatccggccgacttctaggataacaaagaccatcaccgaaaggatgaagatgccttttaacaacgttaggtgtcgctgaattccttcatatatgtgtttgccccattttcgcatatcaaccgctccttaacttaattaatttaattataagctatcccaaggcaaaacacagtaaaatgacaattatgttagatggctgttagattatgattttcgcttattacttacccggagcacaatccgattcccgttcacccgacaatcaatatcctctgattgcctttttagttctcaacagcaatggctgtcgcttaagatatggaatccatatttagcatcgtgttattttgtgcaactcgccatttatgttttacaaaaaaatatgtaaaaaaagaaccccacattagtggggttcttttagaaataaaacgtgctttcattaactgctttctgcgctttgctacatcagtcaaatcaccggctgattaggcaaatgctcaaaaataacccgttaatgacgcactttattttgaaacgtgccattggcgctagatttctgcgcttaactacaaatcgggcatcatggcttagatcgccgcgatgcccgattttaggttagtgctcaaaatctaaacaagcgccaagggcgctctatttaaattatttcaagttaacgacagcgccaacttcttctaatttagctttcatttcttctgcttcgtctttagcaacgtcttctttaagagctgaaggagcgttatcaactaagcccttagcatctttcaagcctaagcctgtgatttcacgaacggctttgataactttaaccttttcttggccgatttctgataattcaacagtaaagctgtctttttcagctgctgcgtctgcgccagctgcacctgctgctgctactggagctgctgcagaaacaccgaattcttcttcgattgctttaactaagtcgtttaattctaagattgatgattcttttaattgatcaacaattgcatttacgtctaatgccatttttgtttcctccattttgtgggtaatattttttgataacacttttaactacacaattttaaattatgcagctggttcgtctttgctgtcggcaactgctttaacagcatatgcgacattgcggactggtgcttgtaatacagaaagtaacattgataataaaccgtcgcgacttggtaatgtagccaaggcattgatttcatcaagtgttgccactttaccttcgatcataccacctttgatttcaagtgcatcagcactcttagcaaagttagcgatgatcttagctggtgcaacaacatcttcgttagaaaatgcaactgctgtagggcctgtgaatgtatcatccaaaccttcgtaaccagctttgtctgctgcacgacgcaagtaagtgtttttaacaacttccatttgtacgccagcttcacgtaattgtttacgtaattcagttacttgttctactgttaagccacggtaatccataacgacgatagaaacagcactattgaatttttcaacaactgtgtcaacaatttgtgctttttttgcaatgattgtttcgctcaattgattcacctccattagatttgtaaaacttgtggtcaagagttccttataaaaataaaaaactccatgtccaccaagacatagagagggatttcaacgtatcttcctcggcaggatattaagcctattggcacctgagtcttcggtagcataaataaccaactacaaatatagcatggattccataaagcgtcaatcattatcggcacttaattttagttatcctagcattacgttttacttattttatttttctgaaaaaacggtttaaaattgagactatcaagaaaattaatcgtaagaggtgcagttttttgaataatattttagtcgttaacgcgggtagttcatcattgaaatggcaactattccaacaatctgatttaaccttactggcaagcgggctcatggaacgcatgaacacaccagaagctagcttcaccttcaagttccaaggtcaaaaagaacaagtcgccattgctaatctttcctatgaagatggtgttcttcgacttttgaaacaacttgaagacaatggcatcattcattcacccgcagacatcattgcagtcggccaccgggtcgttgccggtgctaccacgttcgaaaaaccaaccattattgatcgcaccaacttagatacattaaaacaactcgacaagtatgcacctttacacaatcccgtgcaagttgactgcattgaaaccttgatgcatattttaccaactaatgtccctcaagtggctgtctttgatagtcaattctatctcgatatgccagatgaaactagtttttatggcttaccttatgaatacagccaagactatcaaatccgcaagtatggcgaacacggcattagtcacagctatatcttacaagcaacagctgactttttgaaagaacccgttgccgatttaaaattaattacacttcatttgggtggcggttcttcaattacggccagccaaaatggtaagcctgtcgatacatcaatgggcttcacaccgttagaaggcgttccaatgggcactcgtgctggttcattagatgcggccatcgtcccattcttaatgaacgaattggataagagtgccgatgacgtcatcacgcttttgaacgccaaatcagggattctcggcgtttcaggcgtttccgctgacatgcgcgatattcaatcaacacgcgctaccaatccacgggctaaactcgcctacgacatgttcatcacttctgctgtgaagttcatcgcgagctaccacgttgaactcggtggtgcgaacgtcatcactttcacagccggcatcggtgaaaacgacgcccgtttacgtgctgatatctgtgccaagctggctgttttaggcgttcaaatcgatcttgaattgaacgaaaacggctcaggtgcccgtcaaatcagtacccccgattcaactatcaaagtcttgatgatcccaaccaacgaagaattagcgattgctaatcacgtcctagcaaccatctaaattaatcgcgaattatgagagagccattagcgtttttcacgctaatggctcttttttgataaaataaaccctttttatcaccaaatcacgaacgatatttacaaaataataaatatttttcacatttttcttaaaaacacgattgttttgttgtacaataatgccaaggttcttaaaatactaattcagaggtgcataatggataaaaatattgatattgcaacagaatcacgaacgaactggttcgaacgtcaattcaaaattaaggcaagtgggtcgaccattaaaaccgaaatcatcgccggaattaccacttttattgcgatgtcatacattttattcgtcaacccaactatattaggcgacgccggcctagataagggggccgtctttgtcgccaccgcattaactggagtggtcggctgtttagccatggccttcatcgccaactacccaatcgccgttgcacccggactcggcagcaatgctttcttcgcctattccgtcgttttaggcatgggaattccttggcaaacagcacttgccggtgttttcgtcgcttccctccttttcatgcttgtcacggtcttaaaagtccgcgaagtcgtgattaacgcgattcccgctaatttaaaagccgccatggccgtcgggattgggttattcatcgcctttaccggattaaaacaagggggcatcgtcgtcagtagtgctaaatcattcgtcaccattacgagttggtcagatccgcacgtttggttgaccgtcttcggtttaatcgtcaccgttgctctattagcccgcaaagtccctggcgctttattcatcggtttggcggccacagccaccatgggagtcgtgactggtctaatcgcaatgcctcacagcatcatcgcttcaattccaagcttagcacccactttcggtgtctcaatcatgaacatccacaacgtcttcaatgttcaaatggccgtcgtaattctcgtctttttcttcagcgtcttcttcgatacaactggaacggtaatcggacttgctcaacaagctggtttcatcaaggacaacaagatgcctaagtaagtcggcaaagcccttttcgccgattcaacctcaatgattgccggttccgttttcggttcaaccccaactgcttgttacatcgaatcatcaactgggattgctgctgggggtcggactggtttcaccgccgtggtcgtcgccatcatgttcgtcttaagcttattcttctcacctttactggccgttgtgacgtcgcaagtgactgccccaatcttaatcatcgtgggctcattcatgatgaagtcaattgccaacatcgactggtcagaattcgaaacttcttttgcagccttcatgattgttctgtgcgtcccattaacctataatatctcatacggtttagcattcgggctgatcacttaccccatcaccatgattgctgctggcaaaggtaaaaaagtgcatccgattatgtatgtcgctgcgctcttattcctattattactcttcacaatgcacgaattacctgctaaataaaggagattactcatggataaaccaactttaaaacaactaattgatcaagctgccggccgtcaagctgccgacatggtcattaaaaatgcaaaggtcgtcgatgtctataatggccgcattattgaaggcacactcgcaattggtaatggtcgcttcctcggtatcagcgacgactaccttgcaccaaaagttatcgatgcacgcggccaatatgttgtgccaggtttgattgatccgcatattcatatcgaatctgccaatgtctcacccgctgtcttcggatcacttgtaacaccacatggcacaacgacgatcttggccgacccacacgaaatcgtgaacgtcgctggcatgcggggcttgaatacatggtcgcatctgccaaaaagacagcacttgatatcaagtacaccatgccctcgtgtgtgcctgctgctaatccaaacctcgaaacatctggtgctgtaattaccgctgatgagattcaacaatcttatgaccaaggcctcacttacggccttgccgaattcatgaattatcccggtgttgtcaatgctgatgatggcgttttagacgaattactcgtttcactcaacgcaaataaactcatcgacggccactcacccgctttaaaagaacaaggcttaaacgcatacgccgctgctggtattcgtaacgatcacgaatgtacccaagtcgatgaaatgctcgatcgcatcagtcgcggtatgtatgtttatctccgctacggcaccgtctctaagaatatgccaacccttttgaaaggcgtgacgccgcaaaacgcacgtttctgttgtctctgcggtgacgacttacaatccgtaaccctccgtgaaactggccacttggatgaaagtatccgcgttgctatcgcaaacgggatcgaccccatcatggcaatccaaatggccaccatcaacactgcccaatgtaccggcttagctgaccgcggcgggattgcacctggtttgaaggccaatttcctattggttgatgctctcgaacaattcagtgtgaatcaaaccttcatcgatggtcaaaaagttgctgccagcggcgaatacctactaacaactgaagattcagttactggttttgatgacttgttacaaaccgtacacctcgatacattcaccgctcaccaattaaaactcaacctcacaagcgataaaacccacgtgatcggcttacaaagcatcagtcggacgcaaaatctcgtcttaccggtcgctcacactgcagacggtgatttccaatatcatcctgacgaagacatcgctaaagtggccgtagttgaacgacatcatctcactggtaatgtcggcgttggcctgcttaacggcaacggtgcgattgccaccagcatcggccacgatagtcacaacctcgtagtagtcggcaccaacgacactgacatagtcgttgccatcgaagcgctcaaagaaagccaaggcggtggcgttgctgttcaggatggccaaatcatcgcgacattaccatttgtcatcggcggcttaatgagtaacgaacccatcgacactttaattgaacatcaaaaggccttcaatgctatttgccacgataaactccacgtcaccgctcacttcgatccgactatgaagctcggcgcaatgccactcgacgtcatcccgaacttgcggattactgacaaaggtttagtggatgtcacaaaattcgaaattatcgacattaatgcttaattatagcaacaaaaaaagcgctcatcctttcggatgagcgctttttgcattaccaacttagaagctagcaacgtcaactttgacaccagggccaaatgttgagctaactgataaacttgtaatgtattgacctttagctgaagcaggacgagctttgataatcacgtcttgcatcgctttaaagttttctactaatttagcagcatcgaatgataccttaccgattggtgcgtgaacgataccagctttatcaacacggtatgccacttgaccagctttaatgtcgttaactgctttagtaacgtccattgtaactgtaccagtcttagggttaggcattaagcctttaggtcccaagacacggcctaaacgacctacttgagccatcattggtggtgtagcaacggcaacgtcaaagtctaaccagccgccttggatcttttcaactaaatcttctgcgccgacaacgtcagcaccagcagcttcagcttgttttgcttgttcgccttgagcgaaaacaatcacgcgttgtgtcttacctgtaccatttggtagtacgacagcaccacgaatttgttgatctgcttgtttaggatcaacgtttaaacgatatgcaacttcaagagatgcatcgaattttgcaaaatcaactttctttactaagtcgattgcttcttcaacagtgtatgctttagtagcatcaacttgttttgcagcttctaaataatttttaccttttttagccattagggttttcctccttgcaattgtggtgaacggtttttgacctcccacttgatttttcaactttcattgaaaatccgactgaaagtgtcaagcatgaattaaccttcgacagtgaatcccatgcttcttgcagtaccttcaaccatgcgcatagcagcttcaacgtctgcagcgtttaggtcttgcattttagtttcagcgatttcttgcacttgagctttagttacagttgcaaccttcttagtgtttggttcgccagaacctttttgaacaccggcagctttcttcaagagaactgctgctggtggtgtctttgttacaaagtcgaatgaacgatcttcataaacagtgatcacaactggaattaataaaccagcttggtcagctgtacgagcgttaaagtcctttgtaaagcccataatgttgataccagcttgacctaaagctggacctactggtggtgctggagttgctttacctgcaggaatttgaagtttaacgatgtttgctacttttttagccacgaaacatacctccttaagtccgtgatgtggttaagatggccattatatttggtctcccactagtgtatgaaaacataccttaataatataccaagcaattgccgaaaaagcaaggcgattccattaatcgcgccacaagaaatcatcaatggcttgatcaactaaacgattttcgtgcaacatgctatgtgctccacccggtccacgaactaacatctcctggtaatggcgcacgtgtccttttaataggctacgcaatgcaaaactactatcgactgctaccgaaccatcgtgtcgattagttcctagtaactcgccagcaatgtttaagacactgatcgcagttggaaaatacttggcccgcacggctaaataattataattacgtgttcgtttaactggtccacgactggttaactcgctccaaaaaacaagtggtgtatccggaccaattgatggatcattaactggcgctgccaacaatatcactttgtccaccacggcatggtctgatgtcaacaaataacgcaacaccgtaattgcgcccatcgaatgccctactaaattaacttgcgtaacgccatacgcttcttttaagtgttcaataatcgcagctaaccaacggacttgatcttgcacatcggcgcggttattagcaaataagacttgaatcgttgggttattagcctgcaacgccgcgtctccatccacatgcaatcgaccgtttctgcccacccaaatgaccatgctcttcttagcaattccggctttttgtaggcgcccgagtaagtgaccgaatgaatagcgattcccccgatagccatgaatgaatagcgttggttgttttgtatataaacgtgcgcgcggccgccaatgtgccgaaacccggattaatttgtaaaaatccagtcctgccagtaagactaacaaaaaaatgactaagcccactgcaattaatatttgatcaatgatataccacatcgtcatcacatcattctttcgaaatagacactattgattgttcaaaaaaagcggctgagacaaatcatctttcgtctcagccgcctatcttgttggggcttgggacaaatcctagccccctactttaattgttgaaacatgctttttgaaattgactcttgcacttaactacatttgtcaaatcggcgcttgcagcaccaattcgccaaattaggttaatgctcagagtcaatccgtttcaaacgcactcttttttcgaaacgtgctccttcagtcatcccgactgaagtcgcactctaaactagttcgtctacttggtcgtagtctaattctgttgctgtttcacgaccgaacatgtcgatattaacctttaatttcatcttttcgtcgtcaacttctgtaatttgaccgacaaggccagcaaaggccccttcgataatcttcacagattcgccgactttgaactcaacatccaaatgacgagtgctcatgccaagttgacgcaagatttgtgtgatttcatcatctaataatggggctggtttgctacctgcaccgtgtgaaccaacgaagcccgtcacacctggtgtattccgcacaacgaaccaagcttcgtctgacatcaccatttcaaccaaaacatagcctgggaaagtcttcttcatgtcgactttgtccttaccgtttttgatttcatgttcttcttcttcaggcaccacaacgcggaaaacattgttctccatccccattgattgggcacgcgattccaagtttgccttcactttattttcgtaacctgaatatgtgtgtaagacataccagcttttttcgattgattcaaccatgtgcgttctccttttaaataccaaaataaaaaaactccgaccacgcgaagttttttgcttgccattagtatagcaaatccgacttaattaagccagttctaaaagataaataattgtagtacttttaagattgcaaaatcaacaacgccaaagaaaatggcgaataaaacggaggtcatgacgactgttgatgtatctttacgtgtttgtttggcatctggccaactaacagttttcatttcctgaccaacactcttaaaaaacttaatcatcttatttcctcctaattagcgcgtttctttgtgttgtgagtattgcccacaatgtttacagaatttgtttaactctagacgttctgtccgattcttgttctcagcaacatagtagttacgtgagccacagacagtacaggctaaggcgactttcttaacacccatatgaaaagcccctctctaattgacgtttatcccatttactttatcatgtgttgaccaaactgtcaatgtggtggattatccccaccaggtcgtgcggacaatcgctaataacaagctgacaatcaagctaatattgatcgccatcgcattttgaatcgcggtaataaaggtgacatccttcagttgccgtgtattaaaccggcgattattgcgcaaaatgacaggaatcaataataacaatagtaacgattcaatcggtaagaccttcgtaatcactgccacaacaacggccactagtgagaaccaaatcaacgtattatacaaccgcaacgcccaggttgttcctaaataatgcggcagtgtataacgttcattgcgccgatcttgatctagatcacagatattatccgccaacataatgttcgaagtggggattgcaataatcacaccgattaggcatagactaagcaatgttggtaattgacctttaagggtaaacgttggccaatcaaaatggagcgccatgatgctgtcgcttggtacgttgacatagaccatgataaaaaatgcaccaaatgattctgtcacaccactcaacaattcaccaaccggcatccgcgatagcggaactggcccgaacgtgtaaaagacggccacaaaaatacaggcgccaccgattaatagtaataaaatgttcgtttgccaaaccaaccaaattccagccgccatgctgaacaataaaaaatagagcattaaatgcagtgccttggttggcgacaaatgtttgcgcccaatgatattcgtctgtgcccgataatccagatcaactgctttgtagtaatccatcacattattaaagccagtcacaaataatacaatcgaaaactgggcgacaaaataaacaattgtcgtcactggattcagctggccattaacgtaccaacaataaacaatccctaagattaagggcaagacactcgccgtcttgacctcaatccggacaaattctaaaaacgttttaaaagacatctcggacttccttccattaaaaaagctaggacaaattgacttgtcctagcttcatcgtaccttctagcagacagttacccattaattcattggcagctgactgccgaagtcccgttttattcaccgtaaacgatgttatcaactgtaatcgttgctgtatttcctttttgtgcagcattgactaattgttcagcatagttgacgaagctgtgtgatgattctgttgcaccagaaacaacatctactttgcctggttcttgtgctttgacgaattcagaattcaacttagcgatgtattccttaggatcagtcttagcaatcttcttcatttgtttgttgtatgcagcatcgtcagcttttgacttgccatctttattgatgttatcgaatttagattcagtgattttaccgtctttaaccaccattgtgaaaactgttcgatagtcatggctgtaattcttttcttctaacttatatgtgccatcttgcatcttagcaccattgtcgatttcgattgtttcagtgttgccagcttgagcagcttgcactaattgttgtgcgtaattcttaaatgaatttgagctatgagttgcgcctgatacgacttcgatgcttgaaacatctgcacctttatctgtaaattctttgttcaacttaggaatatattctttaggatttgtttttgaaactttcttcattttttcgttgtatgtcttgtcatcttgttttgacttgccatctttatcaacgtaatcgtaagttgtctttgtcactttgccgccggcaacggtcattgacatcttaacgcgataattattttcgtagttcttttcttctaagttgtaagtgccgtcttttaattcaccgccggcaacttgtttcttagcggttgcttttttgcttgatgattctttgactgaactagattttgcctcttttgaagatgaatctttagcgttattactattaccacaagctgctaataccattgctgacattgcaacaactgataaactagctaatgctttacttaatttcataattttcccgcccttttcataaataatcatatagtttgtatcaaccttcacacaaagtcagtttatcttttttatgtaaaaagttcaagtcttttaaatcacttattttacggcgattaactttggttttacacaatttaaaacggtttccttaatagtcatcaatcccattaatcttatccgtgaataaatagacaatctttagtttattctgtataatggatactgattgaaaacgcatttatttcatttaggggtggctcatcatggctcaaaaaaacatcgtcatcatcggtgccggttttgccgggatctatgcgactaaaaaacttgcgaaatattacaagaagaatccagattatcaaattacattaatcgacaaacattcctactttacgtatttaacggaattacacgaagtagctgctaaccgcgtgccagaagaccacgttcaacacgatttgcaacatctcttctgtcgccgcaaaaacgttaagttggtgaccgatacggtaacccgcatcgatcaagcaaacaaaaccgtcattactgaacatggacgctacgcctatgatcaagttatgttggggattgggagtgaacctaacgactttggcacacctggggttgccgaacatggtttcactttaggttcatgggaacaggctgttgaattgaagcaacatattatcgatgttgttcgtcgtggggcaattgaacacgacccagaaaaacgccgggcccttttgaatatcgtggttgttggttctggctttaccggaactgaaactatcggcgaattacgcgactggcgtgatgaactagcagctgataacaagattgatcccgaagaaatccaatttacaatgatggaaatggcaccaaccatcatgaacatgctcgaccgcaacgatgcagccaaagcagaacgctacatggctaaacaaaaaattgatgttcgcaagaataccggtgttacaggtgttcacgaaatgcatgttgatttaaatgatggttcaactttcccaactgccactctaatctggacagctggtgtcaaagcttcctcacaagcggcacaatttggcctaacaaccggtaaagccggccgaatcgtgacaaacgaattcatgcaatctgttgacgatgacaagatttacgttgtcggcgatgtggctttcttcgatgaaactgatgacggccgcggtcaaccccaaattgttcaaggcgccgaagcatctgctgcaacagccctaaagaacatcatcgcaactgaagaaggtaaagcaacagtcccatacaaagggagctattccggcttcatggtttcaattggttctcgctatgcggttgccaacttgatgaatttcttccatctcagtgggttctttgccacattagttaaacatttagtcaacatgctctattttgttcagatttattctggctacgatttattccactattcaatgaatgagttcttcagaacgaagaacgatcgcaacttgatgcgcggtcatatttcacggtatggtaatgttttatggacagttcctgcgcgaattttcttaggcgcaatgtggcttgttgattgttgggacaaggttcaaggtgaaggttcttggttcaccaataagctccggttaccttttgactggcttcaaccagctgtcaccagcggtgcttctaaagcggcggatgcaacaagtgctgctagcggtgccgctgcaggcggggctgctgaaccagcaactgctaaagtcacattcggcctttcttacttattcggtcatgatccaatgcccgtcttcgataagatgccccactggttctacagcatcacgaaggtcttgattccaaaccaagaagtcgccttcttcatgcaaaaaacaatgaccatcattgaaattttaattggcttagctttaattgctggtctcttcacttggttaacgagcgcagtaaccgttgcaatggttatcacattctgcctttcagggatgttctattgggttaacatttggattattccaatggccctcgcctgcatgaacggttcaggccgtgccttcggattagataaatgggttgttccatatttacaaaaacatctcggtcactggcgctacggccaacaacgtgcactatacaaaaatcaatgagtgcgtttgaaacggtttgactttaagcattagcacagggaagcgaattagcgacatagtcgatgatttgattcacagcgctaaacgcagaaagttaacttcaaagcacgttataaaactgagtgcatcaaaagcgtttattctatgcggattagcaaaattagacgaataactagcgtagctagttgtttggctaatagtgctaaacgcaatagaatgcttttgaaagcacattataaaagcaattcacagctatcaaaaggagggggttatgacagacaggcttttgtcataaccccttttattgctattttagagagaaagactgacgcctatgtttaaacaaattcgcgctaaccgttacatcaaaatgattcgccctggtgatataatagtagtcatcggcctgtttattctatcgtttgccccagttgctgtttttagttggcacgaatggcaaacgacgcaagcagcggattcaaacgcgcaggtattgacggcctacgtcaaacaagatggcaaaaccgtctacaaagtgaacctaaccacccaccatggtgttagccacttcacttatcgcgatgccggcggtgattacaacaaaattaaggtaaccgatcatgccattgaggtcactgaagccaattgcttcaatcagattgatgttaagcgtggcaaaatttctaagccaggccaaaccattgtttgcttaccacacaagttactgattgaaattaaagccaaggatgggaccgacacgggcgggatggtttctgcctgatttaaaaggagtacagcgatgactaacgatcaaacgcgtaaatacatctatattgcactcttgtgcgctcaagggattattattggccttgtcgaacgcgcgattccatttccatttgccgtagccccgggtgctaagttgggactagccaatttaattaccatcatttcgttatttaccctaccggtcagcgactgctttttattgatggtgatgcgaactgttttatccgccttgctagggggaaccctctctacttttatgtatagcattgctggggcaacgctaagtttctttggcatggtactcctcaagcaatttagccgccgctttatgagtatgattggcatctcagctgctggtggtctgctctttaatgtcggtcaactctgcgtcgcgagtttcattgcccagagttggcaagtcctcctctatctaccagtgcttgcttttctcggtattctcgccggaattgcggtcggcgtagccgcgaattttttattcgaacatgtcaaaaccctgacttttttaaaagcccaacacgaaatttaatttaacaaggagttaattatggcgaaagtacatgccatgtggcagaactatccagaaatcgaaaccgaacttgcgcaaagtcttgcgctcattgaagacaacattcacaccaaaaatcaagccgtcaccgacgccattttaaagatgattagtgctggcggcaagttgctccgccctgcttactgcttattattttcacagtttaatgcagtcgatcgacagaagatgatcgcattagccgccgctgttgaaacgctacacactgcgacattaattcatgacgacatcgttgataattccaatttacgtcgccatcaagaatcgattcaagcccgtttcggcaaagatgtcgccgtttacgctggcgattacttattcgttgtctgcttcaagttactagccaattatgcgagcgatttgaagagcatccaatttaacagccaaacgatggatcaaattcttgacggtgaactcagtcagatgacaacccgatataatctcgatttaacccccgaacagtacctacaacaaattaacggtaaaaccggccaactgttcgcgctcagttgcttcatcggtgcttacgaaagccaaaaaggcttgaagtttgcccgccaagccgagaaaatcggcttaaatatcggtctcgccttccaaattctggacgatatcttagattacactcagaccgatgtcgattttggcaaaccagttctcgatgacatgcgacgcggcgtctactcgattccgttaatcatggcactgcaatccaatcgccaaacattagcaccctacttggaaaaacaagcagctatgactgatgccgatgtgcacgctgttcaaggcatcgtccgtcaatctggaagtgtcgaaaaagcccaagcactcgcacaagattacacaaaccgcgcactcgctggtcttgcgaaactacccgacatgcccgcaaaaacaacgctacaacaattaactgaacgtttattaaccagaaaagcctaaaaaagacggacaacatgttagaaatgttgtccgccttttattctcgacttaatgctcaaaagttgaccaagcttgaatgcactcattttttaacgtgctcctcgaacagtcttctccggttaactgcaaaaagggcattatggcaagtcccgccataatgcccttttccctgttaatcctcaaagcctacccagttcgagtcacactctttttttaagctgtttatcggatttgaaccgacgacccccaccttaccatggtgatgctctacctactgagctaaaacagcatttcacggttgattaacaaccgtgatataagtatatcgaaaaataaaaagcgggtcaagcccctagagaccaacttctgtatcagaaagtgctaattcaaaatgttgttgtaagaatttagcgaccccgtcattcgtattcgtttctgttacataatttgcagccgctttgacctctggtaaggcattgtccatcgcaacactgtacttcgctgattgcaacattcccaaatcattttgcccatccccaaagacaattgtatgatcggcatcaattccatgaatcatttgaatctggcgaattgcagtggctttatcaatcccggttggaatcatctcgatgttgtctggaccagaagaagacaagctcatcacagcttgatccattaatcgttgtttagcggctgctaaactctctggatgaccgcgaccaatgataatcccgttagtaatctgatcacttaaattcaacaacatttctaaatcagtcaccggttgattatcaatatcggcattcaacaataaattccccgcatcgcgcgcaacaaacttggggatttcttgggtatagtaagctgtgtcagtggtaaaaaagtgcgcagataaattgggatctgctaaacatgcttcgtaagcagctttgagcgcttttttacctaaataatgcttgttcatctgatggccattttcaaagacagcaccgttagaagccacaatccggacatcatcgttaatttgccgcgaaattacccggccaagattgtacattcggccggtggcaatatagaaaatcacatcgcgtttttgtaatgttcgaatcacgcgtttggtcaaaggtgtcacgatttgatggtcaaggaccaacgttccatcaatatctgaaaaaactaagtaaggttccatatgaattcccctcaattttgatttgtaaccggtaacacttcttcgttttagcgtatttagatggggaattaaatagccaatttcgtttcattcacaatcaaacgattaatttatagcagtaagtcttgctatttaccatgacatagtttattatcaccttatttggtaattttaataatgtctgaaggagtttttggctatggataaagaaaatctcaatatcggtgatttagtaaccggcaaagtgaacgaagacctagatggtgcatttacaggaactgttgaaaaagtatatgaaaactccgctttaattagcattacggatttcgatgcagccgacaaggccaacgtttcggaattaaacaacaagatcgttgttaacctcaagcaattaaaagctgctaaagcaaaataaaatagaaaaaagcccaccgacatttatttaccggtgggcttttttctatgctttaatttcgctgacttgtaaagaagcattcaataactgttcagcaacgagcgccaattgctgggcgtcaaacgctggtttaaacaatgcagtgtgcaaaacaccgattagaccccaacaacaataattcaaaatataatcagcgttttccggctgctgaaatggaatcacccgcttgccgtgagtcacggtcaacgcaactaatttattcattaactgtgaatcgggattacgacacaatacccgtaacatagactcgttgtcttgcacatatgacaagacccatctaaagaaagtttggccaacaatctgtggttcagaaggcaactcaaaacgttctagcaactggctgaactcatttaaggtaaaatcttctgtctggcttaaaagatcgtagatatccgtataatgcaaataaaacgtccgccgattaatatcagcccggtcggcaatcatctgaattgtaatctcattaattgggtgttttagcaggagctcaataaaacttgtgcgaattaacttatgtgtccgtttaacccgtctgtcttgcagattaaccatctttcagcctccatttacatcacaattgactaacttgtgtgcattataacacagaaacacttagattgattattgttgaatcaactaaccatcgttatagtagccttaataacaagtcatcggaggtcggcatatgtttctaacaatccaagaattacgccataataagttaaaatttggcgcactgagttttatcatctttttaatcgttttcctagtactcttcatcaccggactagctgccggtttagcaaacgatagtggcgcggctattaaaaatacgccggcgacgcattttgttttacaagccggttcggaaagtcggttgagtcgctcggcactcacccaatctgattggcaagctctcaaacaccaatcactgacacccatcaacgtcacccaagccaccatcgagcggcctaaaaaacaaacaaaaactgatattgcctacattgcagttgacgctacgagcttcatgacacccaaagtcacccaaggtcaaaagctgtccaaccaagccactcaaaaagtggtggtcagcagcaaattacaagccaatggttaccaattaggcgacaccgttaaagatagtaccactggtcagcaatttaaaatcggtggctttagcaagcagatggcttatgcccatacgcctgttatttatttaaaccaccaccagtggcaaaccatttttccaacgcaaaagacgacctataacgcgtttgctagcaaaccgcccttgtcggttaacaagcactaccaagtgatcagcaaacaaaccttgattgataacatccctggctactctgcagaacaaagttcattgtacttgatgatcggctttttatacgtcatctcactgtttgtcctcgcaattttcttttatatcattaccctacagaaattacgggactttggggccttaaaagcattgggcacaaccacacgctatctcagccagcacatcatctctgagattggcttgttaacggcagtggcgattcttttggctggcggtatcattagtgtcatcgcccagtcaatgcctgccagcatgccgtttatgctcacagcaccaacgatcatcggcaccagcgttctatttttagccgtcgccatcctaagcgccctattatcccttattcaggtgattcggattgacccgatcacagctattggaggtcattaatatgtcagcaccgattttaacactcgaacacatcaccaaagattatcccgatggtgatcaaattaatcacattttaaaagatgtctccttcacgattcagccaggtgaatttagcgccatcgttggtcccagcggtgttggtaaaagtactttgttgacgattatgggcgcgctcttgcaacccacagccggtcgtgttaccttggccggtcaagaacttgcaacactcaatcgtaatcgtcaaacacaaatccgccgcgaatcaattggttttatttttcagaattcagaattaattccctatctaacggtcactcagcagctgacttttttacaaaaaatcgcccgtcatcgcgatcaacccgccgctgaacaattactgacacaacttggattaggccatcgattacacagttatcccgccatgctttctggtggtgaacagcagcgggttgccattgctcgggcacttatcaatcaacctgcactcattttagcagacgaaccaaccgccagtttagatgcgcaacgtggtcgtgaaattgtccacttaattcgcgatgcagttcatgaacaaaaacgcgcagctgtcatggtaacacatgacgaacgggttttagatctcgtcgatcacgtttggcgtatcgaagacggtcaactccgccaaaccacataaaaaaaacggtcctttcacaacttagcgttgttgaaaggaccgttttttagttccagaggatagctactattattcgacgttttcaaatttaccccacaagttcattgtggattgaatattaacaaaggcattcggatcggcatccttaacgacccgttttaattccgttagatcgtattttgaaacaactgtcatgatcactgttgtttcttggttggtatacagaccagttccatctaattcagtcgcaccatgaataaagtcacgcattcgcttcttcaattcttcaggtcgcttggtaaaaatcgtcacagtcaccttttgttgttgaatatagatataatccatcaacaagcttgaaacaaagatttcgacgatactgtataaggcagcaccccaaccaaagaagatgcccgctgcaagaatgatcattccgttgatgatattattcacaacaccaacccgtttgccagttaagcgcccaactaacgtcacaatgacgtccgtgccaccagttgaaaaacccgctttaaaacacaagccaacccctaaaccaatcaatgcacccccgaacaaggcacctgcaaatcgttcggtgacaattgggtgaacaggtactggaatgaccttcaagaaaaggacactcgtaaaaacagcgacgatactaaaaatcgcgtactgatgattaatcttgaaccatgccagaatcaataatggcacattcaaaataaagaccaacatcgcaacacttaatgagccgcccatatagctgactaacgaggttagtaattgggcaatccccgtgaccccactcgaatacgtcttcgccggaatcaagaacagattaacactcaccgccgccaaaaaaccgtataccatcgcgataataatttttttcgaatttccttttaaagcaatcactgtagcacctccatcgattaaaaaagccacactccccccttggaagagtgtgacaaatgattaaagtgcgcacttggctataggttcttatccatgacgaaggtcaacttagaaagttgcgttccttctgtcaccaattgcgctaacaaatcggttgttgcttcatggtaatgtgcagcaatttcatgattttgctgggttaagaaatcagtggcattcgcttccgcctttacagcagcatccaccgtagcaatcttagttcttgcccattctgataatgctttttggtagtcaatatcagctttcttaaaggccccgtagtgtgattcaacaatcattgctaatgcttcatataaccagtaagcgttcttcaactgcatcttcgctggtagttcgcgataactttcatccgtatccatcgcattcgtaaagaatggtacgtgtggacagaatgttggtacccccaaacctaaccattgaacaccacgcacagcatctggcacattgtttctaatctgacagatatgtgagttttgcgtccgtgaaagtgaaattgaccgataaatcgtcttttgttcttctgtcccattaccaagtggatcgtaaatagtttcgttataatgtgattttaacacatattgaacatcttccacacttattttacggttagccttgcgaatgaaaggcaagtcactcgattcaggttcttgtttgatttcagggttcaaatagcgttgtgcataccaaacccgtggtgtgttatagtgacgatctaattcagtatccgtcccaaaaatcttacggaagttccattcagcttcactcggattcaagtgattttcactgacgaattcttgaataccttctgaccacatgtaattttctggatcattaaagtcgacatcttcgatggcaatttggttagcggcaactgcataacaatcatccggaatccgaacagcaacccagtgatgcccagtaacaatttcttgataccaaacttcattttgatcactgtattgaacgccattgccttcagctgaaccgtatttagcaatcaaatcccccatcaattgaaccccttgacgtgcagaatcgatgtatggcagaaccaacgtacacattgaatcttcagctaaaccttgcttgaccaacggatcataagctaatacccgttcgttggcataaacactttcagttgcggagagggcgacatttttttcattaatcccgtcttcttcatttaaaccatcacttaaatcgccgttgggggttgatgtgtaacgataaccgtccgtcggtaacggcatggttaagccgttatattttgaaacatatgtctcatgtcgatcatgaactgctggttgtacgaagaaccgtttaggatggattgcatagaagcgatcctcatttcgcgaaatcatcgtagagccatcaattgacgcattcttccctaccatcattgaagtacatgctgataattcgattctgtctgtcatttgaattaggttaacgtcaaaaatcggtccaactcatcattgagttgaaccgctttttttagcgcccctgccaaggactctcagtataccatattaatcaagtaaggttgtttctttcacttcatcaattgtcttggtaccagccaactgcatggtaatcgataattcatggtttaagtgttcaaaaacagattgtaccccttgggcgccacctaaatttaaaccataaataattggccgaccaatggccactaaatcagccccacttgcgagtgctttaaagacatgttcaccacggcgaataccactatcaaaaacgattgggacgcgtttagcaacttgttgcgcaattaaaggcaacacttcaaacgaagcaggtccgccatctaattgacgcccaccgtgatttgaaacccagatgccatctgcaccagcttgaatggcaatttcagcatccactggtgattgaatgcctttaacaaagactggcaaatttgtgatttgtttaatcttttgaatatcttctggtactaatccttgtttagcggcagcataaatttcagagatgcccttcccagcaccgtcagaattactataagctgctaaattaggcattggtagtgggaattggaattgcgtctcgatgtccgcttcacgataaccacccaatgttgaatcgacggtgagaataatggctttcacacctgccttaacggcttttttcaataagaactcattgaattgatcatctttactcatatagagttggaaaaattgggggggcatcaggagccgctgcggctgcatcttccaccaatgtattggcataggtactaattgagaaaatcgaaccagccgctgcgacccctttagcagtgtcgacttcccctttttcatgtgctaacccttgggctgctgagggggcttgaataatcggcgtttttaaatcaatatcccataatttagtatgtaaatcagcatgatcgatgccttttaacacacggggcattatttttttagtattgaaagcactggtattttcagccatcgtccattcgtcttcagcaccgccacggatatagccaaacgcgccagcttccattcgttctttcacgcgtccttctaacgacgctaagtttaaaatatcgattggattttccgcttcacttgtatgatatcccatgatagattccttctttcaataattgaatacctttatcatggttctcttatcaaaagtaagcaaacatttatactcggttatttcacttgcgttcgaaatccaatgtcttgccggtaaaaagtcgtcggtaaagcgagttgcgctaaatcccgatagacctgttgactagctcggcctagcgtctcagcagaataactagcggtatacaaacgcccgccagcgctgaccaattgattggcttgttctgcgacactagcgaaactaaatgtgctgttgcgttttgcaaattgttgcaaagtgggtaaaacaaacggcgttgtcgattgtgtcgggtaaccatctgaagccaccacaacacctaacgtaatgcctgataattgccactgtaacgttggggtttcccccttcaataattgtgcaaaaacttgggcccagtcgcccgtcatccgtggtagcaccacttgtgtttcaggatcaccaaagcgcacattaaactcaatcactttcaccccgtgttgtgtggcaattaagcccgcatacaagacaccggtaaaaggcgtttgacgttcagccatcgttgccacaatcggttctaaaatagtcgttaccgcttctgcaacgcattggtcactaatctggggtactggacaataagcgcccatcccacctgtattaggcccacgatccccgtcaaaggcgcgcttatgatcttgagcaaccggtaatggatagacgcgattattcgccaccaacgccatcagcgagaactcttcaccttcgagataatcttctatcaataactggggcacgccctgttcaaagaacgcctgaacagtttgccgcgcgctcacgtcattttgagcgatgacgacgcccttgccagccgctaaaccatccgctttaatcacaacgggataacgaacgtcatcgagggcatccagtgccgcttggacagtctgataggcttgataagccgccgttggcacatgcgcggccgccataatttctttggcgaaagttttagacccttccaatgccgcagctgctttacgcggtccaaagatcgctaatccagcgtcttgaaaagcatccactacgccagccactaacggttgttcaggcccaacaatcgtataggcgacctttttggcctgcgcaaaggcaatcatcgctgcaaagtcagtcatctcaatcgcaactgtttgaatcccatccaattgcatccccggattgcccggcaaacaatagaccgttgcaacagttgaactctgctgtagcgcacgcgcaatcgtgtgttcacgcgcgccgctaccgattactaatagatccatgatttgcctcctattggctagtgtttgaaatgacggcgaccagtcgtcaccatactgattcctttttggttggccatgtcgattgaatcttgatccttaatcgaaccaccaggttgaataacagctgtcacaccatgttctgcggcgtattcaacgctgtcatccattgggaaaaaggcgtcagatgctaagacgaacggtgcttttaatccattggcttccgcttgttcgattgcaatcttcacagagcccacccgattcatttgccccgcaccaatgccgagggtttggtcctttgttgcgaccacgatggcattactcttaacgtgtttaaccacacgttgggcaaataacatcgcagcttgttcatcagccgttggtgttttgtccgtcacaaccttcaattcagatgcttgatcagtcacccgatcacgttcttgcacgagtaagccgcctaaaacagaaaccatttcgaagcgatccgcttgcttagcagcctcaaaatcaagcgtcatgacgcgtaaattcttcttcttttctaaaatggctaacgcttctggggtgtagcttggtgcgatgataatttctaagaataaactgtgtaattcttcggctgtttgaacatccacttcacgattcaaggcaatgatccccccgaaaatcgatactggatcggccgcgtaggctttttgccaagcttcatagatggttgcacccaagccgacgccacacggattcatatgtttcatcgcaaccacacaaggttcgctgaattctgcgaccactttaaccgccgcatccgcatctttaatgttgttatacgataattctttcccgtgtaattgtaccgctgaggcaatcgagaaagccgttggtaaactgctttgatagaacgctgctttttgatgggcattttccccatagcgcaacgcttgtttaaagtcgtatgaacgtgttaatttttcagggaattcgatgccgactgcttcggttaaataaccggcaattaagctatcataagctgccgtgtggcggaatgccttggctgctaaataacgacggtaatcaactgcagcttgcccctcatcgacgacgtgttcgaggacttgcgcgtaatcttgttgatcaacgaccacgtacactgatttgaagtttttagcggcagaacgcaacattgaaggtccgccaatatcaatttgttctacagcttgcgcttcagtaatccctggtttttgaattgtttctttaaaaggatacagattgacacaaactaaatcgattgtctggatgtcatgggctgctaaagcggccatgtgtgttggttcgtcgcgtttggcaagcaagccaccatgaatattgggatgaagtgttttaacccgtccatccaacatttctgggaaatgagtgacttcatcaatcgcaattactggtacttgcgcttcttgtaataccttgaatgtcccgcctgttgagatcacctcgtaaccagctgctactaatcctttagcaaattcaataattcctgttttatctgaaacactgaccaacgctcttttcattgattgaattactccttctattttggtttttaattaattcagcaacaacttgcggataaatcgcgtgctctgtatcgtgcacgcgttgttccaatgcggctaaactatcgccaggcaacaatggtacttttgcttggacaatcatcggaccgctatcgacaccttcatcgatgtagtgaatcgtaacgcccgtttcagccacttgtgccgcataggcccgttcaatacttcgtaacccagaaaaggccggtagtaacgacggatgaatattgataatccgttgtgggtaggtatgcaacaatactggggtaatcacccgcatataacccgctagcaatatataatccaactgtaacggtgccaacagcgcgacaattgctgcttcatagtgttgtcgatcatcataatcacttaagcggatgaccgtcaccggtacatttcgttggcgcgctttttcaatcaccggtgcgcccggctggtcacacactaaattcataatctccatgcccgctttttttaaggcgtcatcatctgcaagtacttcaaagttagaacccgttccagaagcaaaaatcgccactttcatctcatcaacccaccaattctattgcattttcttgtcgcggtttaaccgacccaattcggtaagcctgttcttgttcagcgttcaattgggcgaggacttgtgccgctttttctggtgcgacggctaagaccatcccgatccccatgttaaaaatgttatacatctcgagtgcatccaattgcccatattgtttaagtgccgcaaaaatcggtaagcttggccatgttcccaattgaatttcggccatcacgttgtcaggcaacatccgcggtatattttcaataaagcctccaccagtaatgtgggccgcgcccttaataaaaccttgttcgataaacggctgacatgcttgtgtataaatccgcgttggtgttaatagccattcaccgagtgtctgaccaggcaattcgggtaagtgactgtcgacggacaacccatgttgttcgaagaaaatttggcgcacaagtgagtagccattcgaatgaatcccactggacgcgattccgattaatacatcccctgtttgaatcgtttcaccagtaattaattgagcttgatcagcaattccgactgcaaaacccgctaaatcataatgtttttcagcatacatacccggcatctcggccgtttcaccaccgattaacagcatgtcagcagcttggcagcctgcaacaacgccgctgacaatttgttcgatcttatccggctgcgtttgaccagccgctaagtaatctaagaaataaagtggcttagcgccttgggcaacaatgtcattgacacacatcgcgacacaatcaatcccgatggtcgcgtgtgcatcagctgcaaaagcaaccatcaacttggtcccgaccccatcggtacttgaaacgagcaccggattttcatactgccccatcgctaaggcaaactgaccaccgaagcgaccaatattttgattggttgcgccgacttgcttttgaatccgacgaaccacttcgtaaccggctgtcacatccaccccggctttttggtaagcatttgtcatgattgttgctccttatctgcttttaaacttgcctgataggcagcttcatagtcataaagtggcgttggatagtcgccgttgaaatacgccatacataatccggaatacggcgcatcttgctgtaacccaatcgcgtcgattaatccctgttcactcaaaaagccaagtgaatccgcgccaatcgtggcacacatctcagcaatactttgatgcgcggcaatcagttcatcacgtgtttgaatatcaatcccataaaaacaagggtacttcaatggtggggacgcaatccgcaaatgcacggataatgcgcccgcttctttcaaacgtttcacgatgtgcttgctggtcgtcccacgcacaatcgagtcatccactaaaacgattcgtttaccagccacaacacttttaaccacggcgagtttgcggtttaccccttgttcacgaagggcttgcgttggttcaatgaacgtccgccccacgtattgatttttaacgaggcccatttcatacggcaaaccactttcctcggcatagccactagcggccgataacgatgaattcggcaccccaattaccatatccgcatcaactgcggtttcgcgtgctaactgtttccccattcgtttgcgggccgcatggacgttaatcccacagatatcagaatccgggcgagcaaagtagatatattccattgaacagattgaatgcgtggtttcggttgtgaagaagtcagaatgtaacccgtccgcatcaatcgtcacaatttcgcctggctgcacatctcggataaaagttgcttgaacggtattgagcgcacaggtttcactggccacaacgtagcccccgtttgctaaacgtccaatcgagagtggtcgaaagccgttgggatcaagcatcgcaatcaatgaatcttgcgttaataataggtaggcaaagcccccacgaatttgttgaagggccgtcttaatttgcgcgtgcaaatcaggcccttctgcacgtcgaatcagatgcatcagaatttcagaatcagagctcgattttaagatggcccccgattgttcaagcatgcggcgcagtgtgaccgcgttggttaaattaccattgtgtgcaagtgcgaattgatcggttgcaaaatcgaataggaacggctgaatattttctaaaccgtgactaccagcggtcgcataacggacatgaccgattgccgcgtccccggttagttgggttaagtgctccggtttgcggaaaacatccgccaacaaaccgcgattgcgataacccattaagtgcccgtgatcattagtgacaatgccggcaccttcttgcccacgatgttgcaaactatgcaagccaaaataagtcatttggtttgcttctggactaccccaaatcccaaaaacaccacattcttcatttaaactttttatttcatttgacatggtatcgccgtcttccaacttaacttcgcttcagtcaccgataactcaacagttgattcagtcgtttgcacttgcataattggcgtggccgagaccgtcccaattaattgcgcctgatcttgacagaacgcttcaaacgccgtctgattttctggccgaaccgtgatgataaagcgggattgcgtttcaacaaataactgttgttgattaagggggacttgcacgcggcagccgagttgttctttaaaagtcatttcggctaacgcaaccgcaaaaccaccctctgataaatcatgtgcgctagtcacccagcccttttgaatcgctgctaagacgcaatcttgactcgctttttcagtggctaacgaaaagccgcttaatcgtcctgcaactttgcccgtcaacatattttggagttccgaacccgctaaattcgtatccgtctggccaacgaggtagattaaatcccccgctgacttaaaatcttgcgtcgtgatgtcggctgtatctcgaatcaaaccgaccatcccaatcatcggtgttggataaatcgcttcgccattgaattcgttataaaaagaaacattaccagagatgaccggcgtatcgaaaacctcgcaggccgccgcaatcccttgggcactttgatcaaattcccagaatacctctggcttttccggattgccatagttcaaacaatccgtaattcccagtggttggccccctgccgcaacgatattccgtgctgcttcggcaactgccacttgcccaccgacttttggatcgaggtataagtaacgcccgttacaatccgtcgtcatcgcgagcgcttttttagtcccacgaattcggacgaccgccgcatcgcttcctggtaaaacgacggtattggtcttcacttgtgcatcatagtggctgtatagcgagcgtttgtcagcaatcgtggattggcccaataaatcgagccatgttcgtttaacatcattaatcaccgactgataaggcgccatcgctttaaattcagcgatgcgtgctggttcagtttgtgctttatgataaatcggcgcatcactcgttaaagccgccactggcaaatcggccactaattgcccaccatgccacaattgatattgttgactctcagtcacttcaccaatccggaccgcatccagatcatatcgttcaaacaaggcaaccacatctgtttcatgaccagctttaacacaaagcgccatccgttcttgcgattcagaaagcatgatttcataagcggacatctctgtttctcgttgtggcacaagatcaagattgagaatcatcccagtacctgccttttcagccatttccgctgttgaagaaactaagcccgccgcacccatatcctggatgccgactagccaatctggatgcttcaaaattaattccaaacaagcatccattaatagtttttccataaacggatcacccacttggactgctgagcgttgggtcgccttgccatctgcaaattcatccgatgcaaaagtggccccgtgaatcccatcgcggccggttttagccccgacgtagaacacactattgccagcaccacgcgctttaccttgctgaatatccttttggtcgatgacaccaacgcacattgcgttgacgagtggattagtctgataacatggatcaaatccgatttcaccaccgaccgttggaatcccgatacaattaccgtacccgccgattccagccacaacttcttgaacaaggtatttcgtgtggtcatccgtcaattcaccaaagcgcagactgttcaaaagcgcaatcggcgtcgcgcccatcgaaaaaatatcccgaataataccgccgacaccggtggccgccccttcatagggttcgactgctgagggatggttatggctttcagctttaaagaccactgcttgaccatcgccaatatccaaaatcccagcgccttcacctgggccttgcaacacgtgctgaccacttgttggaaattttttcaaaaccggcttcgaatttttatatgagcaatgttcactccacatcactgaaaataacccggtctccgtataattcggcaaccgttttagaattttagtacgaatcaattcatattcatcatctgataacccccattgctgataaagcttggtggcttggatttctgccggtgttggttgctttaacacggttattgccctccttttcgaatcgatgtgattaatgctgcaaataaacgttgcccatcatcgctacctaataaggtttcgactgcgcgttctggatggggcatcatccctaagacattgccggcttcattcgtaacgcccgcaatattcgctaaactaccattcacatcattttgataagtaaatgcaatttggtggttcacttttaaccgttccagggtctctgcatcgcaataataattcccttcaccatgagcaatcggcaaccgaatttgttcgttcggcatatagtgttgggtgaacatcgtaccggcattggtcacgttcaacgcgactgtgtcacagataaaatgggtttgtcgattcggcaaaagaacgcctggtaataacccgagttccgttaaaatttggaacccgttgcaaataccgataaccggtttgccagcagccgcaaacgccttaactgccgtcataatcggtgccaacttggcaatcgcaccactgcgtaaataatcgccgtatgaaaagcccccgggcactaatacggcatcaaaacctgccaagctagttgctgtgtacgggacatactcagcgttttcatgacaaacatcttcaattgcatgatataaatcagcgtcacaattggaacctgggaaaactaatacggcaaatttcattgattcgtcgccaccttttgtatgtcgtagtggtattgttccatattaggattggctaagagttgatcacagatttgtgcgacctttttttcaactgcggcttggtcatcgccagccacttgcatttcaaaggacttgccaatgcgcatgccgctcacaccatcaaagccaagtcgttcgatagctttttggacagcctggccttgtggatctagcaccgaatctttataagtcacttgcacacgcacattaaacatctgtagaaccccctaaaattttttctaatcgtcgtaatacgacatcgtacaccgatactaaatcccctttgttcaagcggaaaacatccttatctagcgattcatgcgtcgtttgatcccacagacggcagttatctggggaaaattcatccgccaaaatcaagcgaccgtcataccggccaaattccaacttaaagtcgattaaatcgatatccgcacggtcgaataaatcgattagcagctggttgatctgcttagtttgtttttcaatcacttcaatttccgccggtgtcacaattccaagcgcggtggcttgcgaaatattgatggctggatcatctagtgcatcatttttgtaatagtattcgataatcggcgtggccaatcgtttacccggtgcttgaccaaacttgcgggcaaaactccctgccaccacgttgcgcaatactacttctaggggcacaatcgtcactttcttgacgagctgttcagttgctgaaatattctcgattaaatgcgtttcaataccatttgccatcaagtatttgaaaattaatttcgaaatctgataattcaataatccttttcccgtaatctgttccttgcgtttgccatttaacgccgttgcttggtccttatagaccattctcaacacattttgatcgtcagttgtaaaaacatctttcgcttttccagaataaaacaacgtctcactcatgcttgaatccctccaaataacatatattttatttaaaattaaaataatcgttcgtgttacattagggtgtaaaaaaactttgaaataacctcatttcaaagttttcatcattattcgcccaaaccaacgcggtcaaagatttctgcgacgcggcgaatatggtaatggtaatcaaacgcgtcgtctaaatcagcgggcgtcaacacattcataatccggtcatccgcttctaataacggtctgaaatcagtttgttgatcccaagcttgggccgttttaggttgaatcaagtcataagccgcttctctcgaaagcccatgatcgattaacttcaaaagaacccgttggctgtaaatcaacccgaaagtccgccccatattacgcttcatattttctgggaagactgtcaagtccgtcataattttggtgaaccgtcgaagcatataatccaacaaaatcgtagtatccggtaagatgatgcgttcggcagaactatgcgaaatatcacgttcatgccagagtgcaacgtcttcatacgccgttaccatgtgtccgcgaatcacgcgtgccaagcccgtaatattttcagaaccaatcggattccgtttatggggcattgctgatgagcctttttggcctttcgcgaaaaattcttcgacctcgcgggtttcagatttttggagaccccgaatttcagtcgcaaacttctcgattgaagttgctagtaacgccatttcagccacgtaggcagcatgcaagtcccgtggtaagacttgtgttgagatttcttgggcgcgaattcctaaatggtcgcacacataggcttcgacaaacggtggaatattggcaaacgtgcccaccgccccactaattttaccggcttcaacgccttttgcagcttcttcaaaatgtgccttatgtcgttttaattccgaataccatagtgctagcttcaacccaaacgtcgttggttcagcgtgaacaccatgcgtccggcccatcatgaccgtatcttggtaacgtttggcttgtttggcaatcaccgccaatagcgcatcgatatcggcccgcaaaatggtgttggcttgtttcaacaaataaccatacgccgtatccaccacatcggtcgatgttaaaccatagtggacccacttgcgttcatctccaagtgattcagaaactgctctggtgaaggcgacaacatcgtgccgcgtttcctgttcgatttctaagatccgtggaattgagaacatcgcattggcacgaattttcgcaacatcttcagccggaatgtgtccgagttctgaccaagcctcatccgctaaaatttcaactgccagccatgcctcatatttattctggtccgtccaaatcgcacccatttcaggatttgtataccgttcaatcatttattagcgtcccctctagtcccaaattttagtctttttaattgccgttaacgtttcatcaacagccggcgttaataacgtgacgtggcccatcttgcggttgaccttttgaaccactttgccatagtcgtgataatgccaatctgctgactgccgactggctgttagcgctgcttgccagtgctgcccaagaatattgaccattaccgctgattgccacaattgtggtatttggagtggccagttgcagacgccccgaatgtgggttgcaaattgagaaaagtcacacgcttcaatcgttagatgacctgaattatgcggccgcggtgcaatctcattaacgtagagttgcccgtcatggccgacaaaaaactcgacacctaacgtgccgactaattcaatctgcgtggcaatttttgccgcaaccgattccgcttgtgccgctaacgccgctgaaatgcgcgccgggcagatgctgatatgtaaaatgttatctcggtgttgattctcgattgcgggaaaaacggcttgttgcccggctgaattctgactaattatgaccgaaatttcttgatcaaaatggaccatcgcttctaatacacaaacactagcggttaacaactgttgagccacctccatatccattgcggaccgtagaatgacttgtcctttaccatcatatccaccgcgcgtggtcttcaagatacaaggaaaaccaacttttttaacagctggtattaattctgcaggggtcgttacaatctcaaaggtggcatgtggtagctgttggtcaacaagaaattgtttctccaacaatcggtcttgagcaatccgtagcgccttcgtcccttgaggaatccatgtatattctcgggcagcttcaatcgtcttagcatcgacgttttcaaattcatatgtcaacacatcgacacgttgcgctaacatcataatttgtgcctgatcatcataagctgccacaatttgatcatccgcgacttgtccggctggacagtctgcctgcggatctaagataatcactgcaaaccccatctctttagccgctaatgtcatcatctgacctaactgaccgcccccaacaatcccaatcgtttgccctggtaaaatttggttagtcaaagtctgcattacttgccaccgcctttgcatgcatccgtgcttgatactgttgcagtgccacttgataagctgggacctgcaagccacaaatctgtgtcgctaaaataccagcgttaacggcccccgctttaccaatcgcaaccgtcgccactggtacgccacctggcatttgcacaattgataataaagaatccagcccactaagtgccttactttgaattggcacgccaatgactggtaagactgtattggcagcaatcatccccggcaaatgtgcggcaccacccgcaccagcaataatcgcacgatacccgttcgcctgtgcttcttttgaaaaggcgaacatttcatccggcatccgatgagcagaaataatctgtttcgtataactcacgcccaactccgataatacagaagcggtctgttccattgttccccaatctgatatagagcccataacaagtgccacatcactcatattctttgcccactttctcgttgttgattatgctttgattctaacaatcttcatctgatatgtcaaaacattttacgaactattttacataaatatatttaataattcgtatttaaatcataaatacacaaaaaaaacgattaacctgttggttaatcgtttttttatcgttatggcaatacaacgaagagtaatgcacctaaaatcccaccgatgattggaccgacaactgggatccagctgtatgaccagtctgaatcacccttgttggcaatcggcaagactgcatgggcaatccgtgggcctaaatctcgagccgggttaatcgcgtaaccagtcgtcccaccaagtgatagaccgattgctgtgataaccaccccaaccactaatgggttcaaaccggctgttaattcaccacgtgttaatgctagtaaagcgaagattaagacgaatgtcccaatcaattcactcattaaattggcaaatgggctgcgaatcgcagggccagttgcaaaagtgcctaagattgctgcttgatctttagtagcttgccaatgtggatagtattgaatccaaacgacaactgcgcctaagaacgccccaatcatttgggcgataatgaatggtaccaccgctgcccaaggggtcttgccaatcattgcaaaagcaatcgtcaccgctgggttcaagtgtgcaggtcccataaatgcagaggtatatacccctaaagtaaccgcaaagccccaaccaagcgtgatagcaacccagccagcaccgttggcttttgtttttgctaagctaacgcccgctacaacgccatcccctaaaagaacaaggataaacgtcccaacaagttcaccaagcgcctgaaccattattgaatgttccatgagatttcctccaagttaagtcctattttaaatagtctaattgtgcttcagcaattgctgaatccaataattctgtttgacgtgctttttcagcgtcatcccagttcaataaacgcgccatttcatcaacaactggttgtttgatggctgctaattgatcattgtggaataagatgaagtttgtccgtcttaaaagataatcaactggtgttaatgtcatttcttcgttaactgagtatcttaagctgattgtttctttcaagttcaagccttcagcagcaccttggtccgcgtatgaaacaacccggctgacgtttgaaccgaagcggtttgctaaatcaatcgcatcttcttcatcaatccctttgttcatcgcaacttttgcatagaatttaagggtatcatccacgttatttggatcgaagtgcccacctgaaacttgtaatttcttagaatcgatttcacgaactgtttcattgaaatctttcttcaagatatcccggattaattcaagcgcaccggctgccatcttacgataatcagtaatcttaccacctgataaagtgattaagccgttttcagccactttcaaatcactaccacgagaaacttgtgatgggttgactgattcttcagcatgcgccgttcttaattgactgattgctttttcaacatctgcacgagcagctgttttgttttcgtaatcatcaactgtcttgattaagttgttgaatgattcttctgaaaccttaccgctattagcgccaccaccgttataatcggagctaccgttattagaaattaatggtcgtaaacctgcccagctagcttcaatatcgtttaaagcgatattaacgctaggatagcgattgttgattgcttttaagaggtaatcaacgtctgcttgttcaacacgtgggtgtttgaaatcgcctgtgtaatcagtatcagttgtcccgaagtacgtcttaccttcgcgtggcacaacgaaaatcatccgaccatcatgtaagcctgaatcgaagtaagttggttgtggcactgataaacgactactatcaacaactaaatgaatccctttagtaggacgaagtgtttcttgtgctttgacttccgtgtttaaagcatttactttatccacccaagggccagcagtattaatgactaatttggcatgaatatcgaatgtttcatccgttaattcatcgtgtgctttcaaaccgtttacgcgaccgtttgcatcataagtcattccgactgctttaacgtgacttgcgattgatgcacctaattcgtcagcttctttaatattttcgatgactaagcgcgcatcattattgacgaaatctaaataaacaccagcacccatcaaacggtctgacttcaagccaggttcgcgttggagtacttctttacgatcaattgtatagttggcatattgtgtaccagttacccctgccaatttatcgtataaatccatggcaatcttgacactgaacatgtcgtaagttgcttcaggttcatcatagattggtaaaagcattggtgtaggccgtgggatgtgaggtgcaatcccttgaacaacggcccgttcactaacagtatctgcaacaaccccaacgtcgaaagtctttaaataacggataccaccgtgaactaacttcgttgaacgtgatgaagtcccctcagcaaaatcttgcatttcaatcaaaccggttttgatgcctgatgcagccgcttgaatagcaaccccagcaccagtgatcccgccaccgattactaataaatcaagttgttcgttctttaagttattaattacttgttgacgtccttctaatgaaaatgtcattataatcctcctcattcacgcattttatatggtcgatgtttgaaaacctttgttgcttcaactgcttgttgccaaccagcatagagatcttcccgttcttcttcaggcatttctggttcgaaacgttgcccaactgagaaaatatgcgccaattcgtctgtatcttgccagaaaccaactgctaaaccagccaaaaatgcagcccccattgcagttgtttctaaattagctgccttttcaatcgagctattcaaaatatctgcttggaattgcattaaatagttgttgtttgcagcaccaccatcaacgcggagcactttgatatcaatgccagtatctttttgcatggtttgaacgacatcccgagtttgataagctaatgattgcagtgttgccttaataacgtcttgtcggttcgtcccacgcgtaatccctagaattgaaccacgtgcttctgagtcccagtatggtgcacccaaacctgtaaaggcaggcacaacataaacttcatttaaactggttgaagccttagcggctgcttctgaatctgatgatttttcaaccagttgcatactatcacgcaaccattgaatggctgaaccagcaacgaagactgagccttcaagtgcatagttgactttaccattgattgaataaccaattgtcgttagcaagttgttttctgacattgttggtttttcgccagtattcatcacaataaatgaacctgtcccataggtgttcttaaccatccctggttggagagctaattgaccaaataatgcggcttgttgatcccctgccatccctgaaattggtaccgtgctaccatagaaatgataaggtgctgtttcaccataaatttcagagtttgaccgaacatcaggtaacatggcccgtggaatgtttaaaatcttgaggatttcgtcgtcccaatccaaatcgtgaatgttaaacaacattgtccgacttgcatttgtatagtcggtaacgtgtgaagcgccacctgttaacttccatgtaatccaagtatcgatggttccaaagaggagttcgcccttttcggctcgttcttgtgcacctggcacttgatccaaaatccaacgaatcttagtcgctgagaagtaagcatcaattaatagccccgtcttttgatggaataattcttcatgcccatctttcttcaattgttcggcaatgtcatttgtttgtcttgattgccaaacaaccgcattataaattggtaaaccagtttccttatcccaaataatagttgtttcacgttgattagtaatcccaatccccgcgatttgatggggttgaatccccgatgatataaaagcgtttgcaatcgtcgataaaacagcgttccaaatttcgtttgcattatgttctacccagcccggttcggggaagtactgggggaattcacgctgtgcatcggcgactttttgaccattgtgatcaaaaatgattgaacgagtactggttgttccctcatcaatcgccaaaatgtatttttcagtcatcttaatcctcctttaacaacaatgttaggaaaacgtttcctcgaaaactattatagattaccgatgtccaaaaagaaagcgttttaccaaaattaaattttacacaatttaacatccttaccaattcggcatttgtagcacatccaaaattaaaaaacgggtcaataatctcagatcaacactaattaaagtccttcatctgaatcattaaacccgtttttttacttaaatcgttgcagttattttagtatataattcaccgttcatcttgctgagcgaaaccttttcgttcttttcgtttgaaaataacacgatatagattcggccaccgtggctaaatccgttcgacacattccagcctgacaaataaccacgattaacaatgagtgctggatcattgtaaaagcccattccatagtgggacgtactccctggttggaacatttgagccttactctgttcattaattaattttccagtccacaacgcgcggtcaaaacggtacatatcagtcgccgtcatatacatatctccgacccctggtagttgcgtgaaattggggagttgtcccgcagcgccatttgccagatagccaatggaagccgctggtaatcgcgaatattgatccgtcatgaaaccagtgtgcgccattttacttggttttagaattttttcttttagatacgttttgtaatcttgatgactcactttttccaaaaccttcgtcagcacaatatagttcgcatccatatagtgccacttgcccggttgttccttaatcccatttttaataatttcttcgattaattggtcgagagtcttcgtctgattatcttggtcccgaccgacaatgcctgatgtatgatgtaaaaaatcagtcagtttaatctgctgcccattcggaaagtccgggaggtaccgactgattggatcgttgacgtttagctttccttgttcttgtaactgcaataaactcgttgcaatcaacgctttttcagttgaaccaatcgcatatagcgtatctggcgtattcaccaactgcttggcccgattagcactgccgtaccccttatccaacaaaacttgcttatcgcggacaattaacgcggtacctgaaaagccaatttgctttaagtagtcatctaacgcttgttctgcaacaattgtcggttggctttctgctttaagtcgttcttcctttgctttagcagcagcgactttttgtgattcgcgctgtttctttgcttcttgcgcttgtcgttgtcgcttaatcttggcttgttgttgcgcgatttttacttctcgttggtgatgttgtcgctgaaccacaattccgcccgctaccagaccgaatatgaccagaataccaatgacaccaccaatttgacgccctttttttgacatcaactgtccctccgaaatttctaatctatccattaatttattacaatattaatgtacaatacgcttttggatttgaacagtgacattattgtcatctaaccacacgcaaaaaagcggtcgcgacaaaaaatgtcgtgaccgcttttttggaaccagacgttcttatttaactaataaaacattcgttgcagcatgggcactaacatattgggcaaccgatcccatcatcattcgttcaataacccctttccccgtaatccccaacatgattaaatcaatcccatattcttcaggaatgcgaatcgcaatttcttttttcggtgagccgacttccagaatcggggtgaccttcgttagcccatgattattcgcgtaacgaatattagccgctagttgctccttcacacgatctttttccatcgccgtcatcttggcatagacactagcatccggtgaaacatagactgtacttggaataatatgagccacataaagctcagcatcatttcttttcgcaacttcaacagcttccataaatgccttgttcgctaagtcagatccatcgaccccgactaaaattttcttatacgttgtaatcatttagcaacaccctcctattaatgaaatgaatgcgaatcctaactatatgttcatcatactgaacccaataggaccttgacaatttaactgcctaaacaaaagacatatcgttaatagctatagtaccgtcgatggtgcacgaattcgagttaaagaattggtatctctaaaaagcctaatatatactgaccctaagttaattaacgaaagcacttaatagctatctcatgcactcatttctaaatcaatcaacttaaataataatttgaaaaagaaaggactgtcacatatggatattgtcataaccggtggaacatctgggattggctatcgcattgccaaagatctcattgcagaaggccatcaagtcattatcatcggacagaatgcggcaaaaggccgggcttctgtggcccaacttggaaaagcggccttttttatccaagccgatttagcgaccaaatcaggacgcaaccaagcactggcaagcatcaaatataaagtggataaaatacacgttctagtgcacactgccggtgttttccccagctcacagaagaaaatattaaggctaatttagtcccccattatcagctaacaatgggcttagcagaccgattaactggcggtcgcgtccttatcataaccggtgatccgcaaatcattcaacaactcagcatttgcgaagaacaggagactactttacaacgtgcaaggtggttattaacccataaagctttattaaccctctttctcagttatcttctggctgaaaaagagattacggtcaattcatttttcccagggaatgtcaccgatgagctaccgcattattcccaaacattgctgcatactgaagtgccagttggaaaatacttagcactccatcccgatctaacgcagagcaccggtaatttttttgataatgatcgcaacttggtgttactcaatgctcggcaatacaactatgataatgccgaaaagcatttgttacagtatttaacagagtaattgagactataaaatcgcttatcattagtggcaacatgagaatattattttccactaaactaaaaaaggacctgagacagtttttgtctcaggtccttgcttatttgattgaattgattgtataaaaaaaccccgcagatgcggggcacaaatattaaagtttaacgatgtttgttgcttgaggaccgcggtcgctgtcttcaacatcaaatgatactgcttggccttcgtctaatgacttgtaaccgtcaccttggatagctgagaagtgagcaaatacgtctttgccgtcttcaccagtgataaaaccaaaacctttgtctgcgttaaaccattttactgtgccgttgttcataataatttcctcctgatacatatcaatgtacgttttttgttgcaataaattattgataggtaaaagaggaaggtattgtgcatccaaaactcaaattacgtttcaaaatttgattacttgaacagtatagcatggcattttctaattagcaacccgcatcccaaaactatcgactaaatcgctcgcaattcattcgcaaaaggctattaaaataggctttaaagcgcataaactttttatttaaatatttaatttctaatcattttcgaaccgttttgtaaactttgcctcgctaagtgccatcaattcctcaggctcaatttcatatttcgaacagataatgagcagttgatcgaagcaatcggctaactcctcttttaagttagctcgcttttcagcgtcgtttttaactttttcacctgggtgatcacgcccaagttcaatcgttctaacggcccgtgataattccccaagttcttcactcaagaagttcaaccgaattaatggtgaaaatcgataccaattccgttgttgataaaaatcaactaaccatgtttgatgcgcttttaaataatcttgcattttacattcactccatcattaaaaaaacacctaacctcgcaagcaatgtgcgaaattagatgtctccaagaattattgaatgtcacaggcgagattcgaactcgcgacctacggtttagaagaccgttgctctatccagctgagctactatgacctcattgattgacggtttttgctgtcagaataccgcataacatgctatattataagcaattgaagtagtcactgtcaattaaaattcgcagaaatgagggaaaaacatgcaattaaatcagtttgcacgcttaactaaatctcaatctgaacaaatcacggaattacagcgcattcatttactcccaaaggatttcacccagctccccttccaagtccttgcccaagatatttttcaacggctgttcccagaagcacatagtcaatcaacccagagcgggcaacttagtttattacaagccacaaccgaattaaatctaaccgcctaccttgaaaccattgatacttcattcgatcaagttgtcttctataatgtcgccctccaactcttgggttttgaaatgacaaccgattttgaacttgatcaacccactgcttttatgaccgccacaaaactcccatttatcgatcaagcggcatttgatcagaccgctttcatcgaagccctttatctcctattaacgacgcgtagccaaactgggttactttatctggatcaattggctaaccgtggtttttttgcagactggcaaagtgatcagccccaatttctcatcttcaatggtaaggtacaacccgttttcgataccagccatttaattcgagaagtcgtttatgttgaatcgagcctagatactgatcaagacggccaacgcgacttattagaaacgactatcttcagaccacgcgaaactgaagcgggcttaaaaattccggcactctacactgccagtccttactataaggggattaacgacgtcgatgctgatttgcacaatgttgatactacaattgcgactaaacccgttcaacaaccaaacttagctgatttaacccaaacgccaaccactgcaccgcttcctcaacctcgcgccgttaatggcacaagtatgacaactgaattaaacgcaacagatgacagcaattacagtttaaatgattactttctggcgcgcggatttgcgaacgtttacgctggcggcattggcacacgcggttccgacggcgtccggacttgtggctcacctgaagaaacagcttcaaccacggctatcatcgagtggttagccggtaatcgacgagctttcaccaaccgcaccgatggcattgaaattaaagcttggtggtgtaatcaccaagttgcaatgactggtaaatcctaccttggtactttagccactgctgctgcaacaactggcgttgaaggtctgagaaccattgtagctgaagccgccatttccagttggtacgattactaccgcgaaaatggcttagtggtcgccccaattgattgtcagggtgaagatgccgatgtcttagcgaagttgtgccaaacccgccaaaaagatgccgctgatcatgcgctctctggcactttcttcgccgaccaactcaaagccctgcaagaaggtcaagatcgcatcacaggcaattacaacgccttctgggcagcccgtaactatcgtgacaatctcgccaacctgaattgcgatgtcatcttagtccacggattaaatgattggaacgttaaactacaaaatgccggcgccttgtgggatttattgcgcgatcaaccggttaataagaagcttttcttacaccaaggtgaacatatctatatgaataacattcagtcgatcgatttcaccgatatgatgaacttatggttcacgcatcaattactcggcgttgagaatcaggctgtcacaaaattaccggctgttacaattcaagacaacgcacaagaagccacttggacgacccaggcggattggctagccctcgacaatccaactacgactttctggctaaacgaacaaacattaagcactaatgctaccgaaaatgccccactgacgacttttaaagatgacggtgttgcggcctttagagcccaaaaaatcagtacagccgcttggcaagatgccttaatcgcagatcaatcaagtttcactggcaaccggttgcgtttcttaggctccccgcttaccgaaccgctcattattgatggtcgaattcagtttagaacaagggtcgctgtcaatgccgaacgtgggctattgagcgtgctggttattgactatggtcaattcaaccgtttaggcaccacacctgctgtattagctgctaaaggccaacaactcggctatcagtggcgctatgatgatttaaaggaatttaagctcaatcgaccaagcaattatcaagtcatcactaaaggacacatcaatctccaaaatcgccacaatagttatcaaaccgacgccgtcaccccaaacgaattctatgatatcacgctcgacctacaacccacccattatgatttaacagcgggacatcaactcggtctattagtctacgcgactgatatgggaatgacgattcgtgaagagcaagcattcgtttaccaagtcgacttggctgctagccaactgattgtcccccatctaaatgattaataaggagtctttttataatgtcaaatctcatcacctgtcgtcaaaccctctccatcagtaaccatcgcgtcttcgtcaatgatttgaacgaacatgaaacggtctatggcggacgcttgcttgaactcttggatggttcggcgtccatttcagctagccgcttagcgcgcgtcgaaaccgtcaccgccagcatcgaccaactgaacttcattgaaccattcaaaatgcaagattccttgtgcatcgaaagttacgttgccggtgtcggcacccgttccattgaaatctttactaagattatcggtgaacatctcaagaccggcgaacgattcctcgggctaactgccttcttaacctttgtcacaatggaaaaaggtccggcccttcctaacattcaacccgaatcaccggaagaacggttcatctgtgccggttatgaggaacgaaaagcccaccgtctcgcaaattttcaaagtcaaaaacatttcaatcaaaatatcagtaccgattatccatggaacggtcaataacgaacaaaagaggtgtcgattatcatcatcggcacctctttttatttatcttaaaagttaaacgtccggctccattcatgtgtgccacgatattggaatggttggcttttaaaacccgccatcccaaaactaacggtcattaaaataattcccacaagaatcatacataaactaatcttcaaccaatttttcaacatctacgccaccacctttaatcgactacggaacatcccaactagccagcgtgtgattccaaccgagaaacgaattaagtatttcgtcatgtaccaggtcgcccctgcacaaatcagccccacaccaaccatcacaaaactaattccaagctgcatcaccgcaattatccagccttcttgtaagccaacaaagaacgataaaactaagctgacactcccaccaagaatgccggcagcagcaaagattgcccccagaaacgggcctaaccaaatcaagaaataaccaagtgccactaatatgatggcggtcaataacaacgtgccccataacggtgaccctaaaactaacaagatactgattaaaataatcaacatcggtgccatcttcttttggcgaaccggtttatctggtgtagctaattgcgctacaatctgagctggcgttgctaaactcgcgataatctccgcttccgtttcacccgcttccagtcgatcatcgattaattcatcgtaataatcaatcgtgttggctgcatcactaatcccataccgcgttaattctgccgcaagctgtttaataaattgattcttagtcattgttacactcccttatgtaagtataaatgcccatcactgccggccaatcggccaaaaaactatcaatcgatgcttgtcccgccaatgttaaatggaaatatttacgcaagcgtccattatgttcgacccgataactttcaatttcaccctgcgcctcgagccgtttcaagattgggtataatgttgagtccgaaatttcaacgacactcgatgtatctttgataatttggtagccatatgaatcctctttcttaagcgttgctaacacacaaaattccaagaggcctttctttaattgtggattcaaaccgatcaccctttcgaaagttaatactatattatgcatagtattgtgtcaagcataaaaaaagaacgcccatcagttttacctgatgaccgttcttttgaaacgtttgataacagtcatatcccgactgttatcaaacccttaatctctgccgccgccaaaaatttggagcattgtgaggaataagttaacaaagtctaagtacaaggttaatgcgcccataacagctaaaccagaaaccgaaatttcaccagttgcgccgtattgacggtacatcatacttaacttttgattgtcccatgctgttaaaatgataaaaataattaacatagcgtatgacaagaagtagctaattgcagctgatgccatgaagaagttaaccaatgagacaataatcacaccgattaaccccatcattgcaaacttgccaaagccgcttaagttattctttgtcatgcgaccataaatcgacatggcaatgaacactaaagcacttgatgcgaaagctgccccaatttcaccaatgttatacaccagtaaaacggccgtaaacgtcaatccgttcaacgccgcatatgccacaaacatggctaacgaggccgttggattcttcattgaacgccgactaatctgaacgactaaaattaattctgcaatcatcaagccccaaaccatccacgagctaccacttgataggattgtgtaagtttgtgctttaaacacagtcaccattaaaacagcaatcagtgctgaaattccgacaccgacagccatcaaaccatacactttactgaaaaagcgggcttcgctgtcgacattcacaacgcgtctttcttccatgaatattcacctcttatatttctaaacgggcccataatcacccgattaggaatattgtaacaaatccatccagaaagacaatcaaaatgcctaaatcttaattatctttaggacttaaattactcaataattcttcgtaagcatattcgtatttttgcacatcaccagcgcccatgaagacaacgactggttggtcgaagtctaagagcggtgacatattgtctaatttcaagacgcggccacctttagtgattttcgcacctaagtcagcacttgaaaccttccctgctttttcacgcactgaactaaagatatccgttaagaagacttcatccgcaaggtttaagctagcggcaaaatcatccattaacgcaattgtccgtgtgaacgtatggggttggaaaaccgctacaatttgtttgtctggatatttttgccgtgctgcatccaatgtggctttaatttctgatggatggtgcgcataatcatcaatgattgtcacgtcagcaactttcttttctgtaaagcggcgtttaacacccttgaagtctgccaattcgcgtgccacttctttgccatcaattttttctaaatgactgacagcaattacggctaaactgtttaagacattgtgttcaccgtaaagtgggacgtggtaatggccgatgttttcgccatgatagtaagcatcgaattctgaaccttgcaccgtccgttggatgttgcgggcttggaagtcatcgtcttcgcgtgtcccataataataaacgggcacattagctttgattttccgtaattcaggatcatcaccccaagcaaaaatccctttttgaactttgtaagcttctgattggaacgcgtcaaacacatcatctaagcctgtgtaataatcagggtgatcaaagtcgatattcgtcatgattaaataatctggtgaataagctaggaaatgacggcgatattcatccgcttcaaatgcgaagaattgcgcatctttaatccctttacctgtcccgtcaccgactaagtaactcgtcttagccacaccacttaaaacgtgagctaataagccactcgtacttgttttaccatgcgcaccggccacgccgatacttgtatagcctttcaataattcacctaagaattggtgataacgaacgactggcaagcccatttcaagggccgttttaatttcaatttggtcatcttggaaagcattcccggcaatcaccgttaagccttcgtgtaaattagtttctgagaatggcagaattttaattcctgctcgttctaaatcgcgttgtgtaaacgtatattgatcgatatctgagccttgtacttgatagcctaggtcgtttaaaacaagtgcaagagcactcattcctgaacctttaatcccaacaaaatggtaaactgtgtcatttgttatcatcttttaaacgtcctcttttcaataaatcacaattatctatatgattaaactaatcccttatagtttaccataatgcgggtttgagctaaataatgaatgtttatttttctctgttatcaattgattgatctctaaaacgcaaaaaaagcagccacaaaaattaattttgtggctgcacttaaacggattctataggtcacactctagcctaatgctaaataatcttcgacattttggaagtagactttataccatgttaagaaggtaaagatggtccagatcttccgacggccgttaatgcgttgttctttattggcatctaacaaggccaataacttatcttgatcaaagaattctgcaacgaaatcttcgctaaagagtgctttgactttttcataatacttgtcatcttctaaccattgcttaattggcactgggaaacctaacttaggacggttggcccaagctgttggcaaatgtttagcagaagcttgacgataagcgtatttcgtatcatgactattaattaagtatttagttgggacttcaccagcggccttagccaccttaggatccaggaacggcacgcgtaattctaagctgtgcgccattgaaatcttatcagccttttgcaaaatatcgtttaacatgaagtgatgtaagtcgatatattgcatttgtgagactggatcagcatccgcaacgttatcaaaatcagcttgatagtttgcttgaatcgttccatcattttgataagcaggtttcaagaaagtattggcttcatctgccccaaaaatacttggattttcgatatcaaaaatcacagattgacccgtatagaattcacgcgggttcgccaaattcgtgtataaatggacgcgacctgggaaggctggcatcttcttaacggctttggctaaactggcacgcgcacccttaggtaatttcttcaagccagaagtgaaggccttaattgttgaattgtgggagtgcatgccgtagttgacatagccagcgaataattcgtcggccccttcaccagataaggcaaccgttactttttcacgggcaaagcgtgacaagaaccataatggcacacatgatgggttcccatctggttcgtccaagtaatattggattttgtcaaattcagcaaacgcatcatcggcattcactttggtttcattgaagttcaagcctaattcatcggcaagcgcccgggctgctgtgacttcattataggtttgatcatcaaacccaacactgaagacttcttgcggttgcaaaatacttgtgacataactactgtcgaccccttctgataagaaagccccaactggtacgtcagccacattatgggctttaacggattcttcaactgcagcatcaatcttagccacttcttcttcgaaagataagtttgaaggattaaatgacatatcccaatatttttcgatgtccaattggccatcttgataagtgaaataatggcctgctgggaatctgaaaacacccttgaagaacgtttcttgtaaatcattgtattgattcatcatgaatgattttaaggctgtcttatttagttctggtttaaattctggatggcgcatgaaagttttaatttcactactgaacatgaaagtcccatctgctaaagtcgtgtaataaaggggcttaatgccgaagaaatcacgagcaccaaataattgcttagtttgtaagtcatagatgacaaagacaaacatcccacgcaattttgtaacaacctctttaccccattcttcgtaagcatgcaaaatggtttcagtatctgaatctgttttaaagtcgtgaccaagtgcgatcaattcagtccgcatttcacgataattataaatttcaccattgaaaaagactagcttagtgtggtcttcattataaatgggttgatcaccctttgctaaatcaatgattgataaacgccgaaagcctaatgcgactttatcatcgataaaatcaccatcaccacttggtccacggtgtttaatgacgtccatttgttggttcaatacttcttttttctttggtaaatcaaataatccaccagcaaatccgacaatcccacacatatgtttaacccctcttttgtgttttactgcttaattgactgcaaaacgaaataacaattaaaaggtttatctttaaccaattaattgctatctattatcatactattttaattttaataatcccataacaaaatcgtaagatggattattttagtagggctgcgactgcatctgctgtcacttcacgaccgacttcccaatcatctggcaagaccataatccctttagcaggagcaccagcaaccccgatttcacgggctgcacagatcatgccgtcactttgaacaccgcggagttgaccaggccagataattttaccttctggcatgacagcgcccaccgtcgccacaatcactttttgtccttgtgcgatattagcagcgccacaaacgatttgaacggtttgatcaggtgcaatctgtgtttgagtaacgtgcatatggtctgaatcaggatgcacatcacattcttggacataaccaacgacaatgtgtggtgtttcatcagccactaaatcaccggtgaaaccagctgctacaagtgcttcatttaaaacagcaacttgctgttcagttagtgtttgaacaccgttgaattgtaaatcgggcaataactcattcaccgctaagaaattatagccgatggtttgatctgcctgatcactaatccgtacgattgattgtttttcagttgtcacttgcttttcaacatcaggttgggtcattaccactaagatgttgggaaaagccgcttggttcatacttgcaattaacatttaatgactccttcaaggttagttcaatgagtgaataaatccagtaatttcgcgttttgttttccgatctttattgacaaaacggccgatttctttaccgttatcaatcacaacaaagctaggaatcccaaagatttcccattcttcacaaatatcgataaattggtcccgatcgatttcaataaagtcgtattccgggaattcagcttcaatttctggcatggctggtttaataaaccggcaatcactacaccaagttgctgtaaaaaataaaacatgtttcccttcagtaatcagatgagtcagattcgtatctgtcatcgctgctaattctttcattatgcaccccttcaattttactactcgttttaatataagcggtttgtccgtaaatgtccactccttaggaccaaaaattatgctatactatttaaagacaaaaacgactgaggagtttttctttgaaaaaaaatgggcaaacgtttaaatatttattaaccggcatcggttttgcgctggcggcggctgccagtgcgaagcaatatcgggcgcaacaaagaatgatcaaattaaaccaaattttagaagatgttaaagccggcttaaaacatgaaggccagattgtgggttcttggattgaagaaagtccccacttattctcacaaaacaaacggacctttccagtctatcaaggtggcatcatctgcgagcgtgaagatggtacaaaccaatttcgattcaaggtagacgcaagaaccggcgtcgtgattgaattctcacaaatttagagtgcgcagcgcggtgggcacgttctgaggattagcttagtcagacgagtgaccaatttattggtcgcttgactgacgttgctaaccgcaggaacataccgcgcggagcacgtttcaaccaatattataattaaaaaggtacgctatcctagataaaatctggataacgtacctttttgagttgaaacgtgctttatcacactgtcttttccggttagctacagaaaggaatcgatggtaaagaacccccatcaatccctttcttaggctaatcctcaaaggcaacccgtgtgataaaaacactcttgctgaaacgtgctattgacgctagatttctgcgcctaactacacctgtcaaattagcgattatatcactcattcgccagcctatgttaatgctcaaaatctgaccgagcgtcaagtgcactcttatctaaaacgtgctttcaaagctagcaccctgtgcatagctacgtccggcaaacaaccaattgcattggttattcaccagactaggctattgctcgggtgctgaccagctttgaaagcactctacttgtagtgtgcctctaatctgtaaatcacttggccgcgcttgctgaatttttcttcgtattccgtttggatgttgtcttctgcaagttcactattgtgtaaatcgagtgagatgtcgtcaaaaaccatcccataatcattcaggctcatcaatgagtattcgaatagaccttggttatcagtcttgaaacgtaagtagcccgttggttgcataatttgttggtattccgctaagaatgacttatatgtcaatcggcgcttttcatggcgcgtcttaggccatggatcagagaagtttaagtacacccctgccacttcgttttcagcaaagaaagttgttaaggctgcgccgttacccaataataattggagatttggcaatttcaattcaacttgtttttgtaaaatgacggcaatcgctgattcttggatttcaactgcgataaagttccggtctggatatttttgtgccatctgagtgataaattggcccttacctgaacccacttcgatgtaaatgggttgttctttggcaaaacgtgtttgccacttgccggcgatatcttccggactcactaaaatcatgctggggttggccgcaattaagtccgccgcccaaggtttatttcttaaacgcattatgttctccttgttgatgccaatcaaaaaggttggacacttgcccaacctttggcatttaatttttattaattatttcagaaatcactgcttctaagcgcaatatgtcacggttcatttcagtaaaacgaccacgttgataatggtgcttaatgctttggagtaggttcaaactgccgtaccagttgacgcgcatcattaattcaggcgtcacctctaggccgtagttctcaagccactcgtgccattcttgacgtggaacatattgaaataaaatcattccgaaatcgactgcagggtcggctaacattgccgagtcccaatccactaagtagagtcgattaatatccgataacaaccaattcttatggcttaaatcgccatggcacacctctgcagaaggtgcttgtaattgacgtaacgtttgcttcaaataatcagctgtttgttctaaaaatgggtgttgccgtaaatcttgcggtaagtcgtaaaaataggcttgcaacatttcgtttgctgaccagacacgaccgccaactttttgtaacattcgtttcaatagttgggattgatgcacccgtgctaataacttagcgacttgtgggctattcatctcatcacgtttcaaggttcggccgttgagccactcttgtgcggttaagacatccccactcgaaatccgcttcgtccagattaagcgtggtgttatgccttctgccgagagcgccgctaaaaatggtgatgtgttgcgctttaggaaaatcttttctgacgcgcgaacgcctaaaaatgcagcgcccgtatcaccaccggccggacgaacttgccagccagtatccaggtcaaaattcatcagcctcgactcctcttcaataaaataaagcgccaaaatacagcgctcacgttgcttcaactgtctaataactaagggtatcatataataattagccagtagtcgtcaagtaggaaagcatgcgtgtcacagggactatgcccccaaccgtttaggcaaatagaattgaacaaagccaatcacgagcacgaacaatgctaaaacacttaaaccaacttgaatcgtcatccctagtgtcactaataaaatgacactaaagagtaacgcctgaagcaataataaagtccgcattaattggctgaacgcttgaattcgtttggtcgttggtactgggtatagatgagtgaaaataatttgatcatactgattgtaaaacggtaataattgaaaaccaactagataaatcaatagaagtccgagtgccaaactcaaccaccatatgtgactgaagcacagaatgatgccccctaaaacaactaaccggatatataacccgctgaattctgtgccccgcaaaaagccacgcgcatataaatagaggtaagtattggctggtttagctataattggctttaataagccatctaaatagcgacgacgcttaacctgactactgagccctggcacatccgtgaagaggttatagaggcggtaaattcgtcccattcgtgaatcttctgcaccaactgccgctaaccaatcgaatagctgtgtcttttgaacacgcgccaattgttgtcgctgataataggctagtccaagcgctacaagcactccgactaaatttagccactgatataattgactggcaattattgccaaatcgaggattaacgaaagcccttttgttgcctgggtttcatccgcttggtaccactgacgcaactggattgaaaagcggcggtctttgatgattaccaatgtaatcaaggcaacggctatgtgccatgccgggaccgtcttagtaattaacaagagtggcgccactagaagcgtcacaaaagccattgcaattaatggtaaccagctactatataaacgtgctgatttcaaatacgtcacaaggccgctttcttttggcaataagaagacactatccgcttcttttaataatgttgctaggcgaccaaaactaactgccgcaagtaatactaaactcaatacaggttttagccaccaagcttgtggatccagtcctttgacggcgttagcatatgtgtagcccaacgctcctaataaaaagataatcgcaatcacgaaatgatcattgaaaacgaggcgcaaatacttcacttgttcttgaatatgtttttgcacgcgtttttgccataatgcttgcatggttaaccttctttcgtcatctgcagataaatatcgtcgagatcggcgtcagccatgttaaattcaacctttaattcttcaagcgtgccagtcgttcgtacgcgaccctgatttaaaagcacaaatgaatcagcatattgttgcgccgttgcgagaatatgggtcgacattagaattgcagctccttgtgcttttttttcagcaatgatttctaataaatcatgaattgccaatggatccaatccagtaaaaggttcatcgatgataaacaagtcagcatttgtcataaatgcattgacgatcattactttttgccgcatcccttttgaaaagtgaaccgggaaccagtctaacttattgtctaatcggaatcgttttaacaatgcattggctttaacccacgtctcttcaacgtttaaatcataagccatcattgttaattctaaatgctcctttaaagtcaattcagggtataagacaggcgtttctggcacataggctactttttggcggtattggtcaggattcgactgtaacgtcacaccgtctaaagtaattgtgcctttttgtggtgtcaataatccaatgatgtgtttaatagttgttgatttgccggccccatttaaaccgattaaaccaaccacttgattgtttggcacagtaaagctgacctcttttaaaacggggacgtgcgcgtagccccccgttaattggttaatctctaaactcataatcaatagcctcgttttttggtttttaaaactacttttttagtgaatcctttttcatatcatatcttaacacgaagtaaactgcgagtgtatgcccccactcaatatttttccatccgcttacaaagctgatggcagtagcgaaaagcccttgtttatgatagcattaagctgtattgagacttcaaataagagaaagtaggcataattaatggatgattgtatcttttgcaaaatcgttcgaaatgaaattccgaacacagtggtctatgaagacgacgatgtcaaagccttcttggacatcacacaagtgacacccggccataccttgttggtaccaaaaaaacacgtggcggacatctttgaatacgatgctgatttagctgcggccgttttcagtcgcattccaaagattgctaaggctattaaagctagcaatccagccatccaaggaatgaacatctgcaataataacggtgcggtggcttatcaatccgtttttcattctcatattcatcttattccacgttacacagcggatgattcatttgcaatgcaattcggtgataatagcgctgattacactgctgaccaactacaagcgatcgcagatggtattcacgcacaattggaggactaatcatgtcattttcagaaggattactagttggtggcttattagggacggcttatgcccttctcaccgcttctacaaccggccccaaacgacaacaagcgattgcccgctatttaaacgagctctcagaaagttcaactgatgttcaacaaagtgctgttcaattgcaaacagcttcgcaaaatttatcaaacgaactcaaaacaactgcagttacatcacttggtggtatcagtgatgcattgcaaacattttcatttgaagcagcaccacgaattgctcaaatcgaagaatcagttgatcgtttgacacaaaacttaaaaaaataaattcaccaaaaattagattgtatgcaagcgataaggttaagcatatcaacgattcccgcgtttttagcgtaaaacctaaatttgaaagttctgtgaagttttagacgcttcgttcaatttagttagtttatgtgttatattaattggtgaattcactacgaatttattcataaatactttgataaggatgtgtcatacaatgaagaaatggctattagccgctgccagtttattaatggtagtttcactagcaggttgtggtagcaagactatcgcaagcctaaagggtggtaaaatcactcaagacgaatactataaagaaatcaaggaaacatctgccggcaagcaacaattgcaacaaatgatcttgcaaaaagcgcttgaaaaccaatacggctcaaaagccatcgataaaaaagttaagaaaacttatgatggttacaaaaaacaatacggttcatcattcaactctgtgcttgcacaaagcagtatgacacctacatcatttaagaacagcatcaaaacacaatacttaacacaagcagcactaaaagataacaaaaaagtaaccaatgctgacttgaagaaacaatggaaatcatacgaaccaaaagtccaagttcaacatatcttagttgaaaagaaagaaacagctcaagaagtcattgatgcacttgcaaaagacaactcaacaaagaacttcaacgaattagctaagaaatattcaactgatactggtacgaagaaagatggcggtaaattacctgtcttcgatagtactgatacatcacttgactcaacattcaagactgctgctttcaaattaaagacaaacgaatatacaacaacccctgttaagacaacttatggttaccacgttatccggatgatcaagaaccctggtaaaggtaagatggctgatcacaagaaagaattaacagacatcgtttacgcttcatggcttaaagaccaaacagtgatgaacaaagtcatcactaaggtacttaagaacgctaacgtatctatcaaggacaaagatttatcagacatcctttcaagctacggcgttaacagcaaagcttcaaaatcatcatctaaataagcattaacaaaaagacccccgctgcgacagcagcgggggtctttttgtacatttattctgttggttgatctaaattaggatcttcgactgggcgatagaaacgccgcccatccattgcgaagagccgttcagtaaactgacctgcttccgcatgttgtaatgactgggtcatcatcgtgatacttgcatctaattcatcaatttgatgcagaacttctgcttcaagaacttgtggccggacaggtgaaccatattccattaaaccatgatgggccaagataacatgccgcaatagcaacatatcctcagcattcacgtcgatctttaatgtatcacaagcccgcactatctcttcatcaaccagtacaatatgaccgatcaaattgccacgaaccgtgtattccgttgaaataggaccggacaattctagcgtcttacctaaatcatgcaagataacaccagcatatagcaatgcctcatcaatttgtggatattgggcagcaatcgtcttagctaagcgcaacattgaaagtgtatgataggccaagccgccactaaacgcgtggtggttggtcttagccgctggaaaactgaagaattccgcttgatgtttttgcattaaatgtcgaaccaaacgttgccaatttgggtttgtaatttcgaataacatcgcgccaaattcgtcttgcatctcggttacttgcaccggtgctttaggaataaactggtcaactgtttgcggttcgtcccccgtcgttaagcgcagtttataaatcttaacttgcggattattttggtataattcccgcttaccttgtaaatggatcacctgacccgccgtaaatttagcaacgtcttcatcagaagcatcccagtatttaccgccgatttgtcccgattgatcttggaacgtaaacgcgatgaattgcttgccgtttttagcaatccgcacgtccgccgttttaattagtacaaataaatccagattctcgtcgttttggtaatcaaataatttctttgctgtcatgtgtcagccccacttcctctagatttaaccaatgatccgcttcaaagtgtgcttgcgtccgcggattggccgttaaataaatcacttggttggccgcactgagtcgttggagtaatgtccaaacggcgatttggcgttgatcatcaaagttgacgaatccatcatccaccaataaaggtaatgagactacgtcagctacctcttctgcaaacgcaaagcgtagcgcaatgtataactgctctgcagtcccctgtgataattcaccgacttcaaaaagcacttgatccgcccgtaaaaccgtcatcagtgtgtcatcgaagttaatcttaatataccgattctgggttagaattgcaaaatactgcgttgccttttccaataaacgggggaaccgttcttgtgaagcggccttcagcgtcgcttgaatccaatcaattgctaactgcttagcgagccactcttgggctaaatcagtaatcttagcctgttcttgtaattgtcgctgtcgctgttgttgataactgtcattatcgacaagttgcgcttgcgtcacgcgtagttgcgcaacagcttgttgctgttcttgtaactgacttgtcaaacttgccacttgttctgtaatttgagcggcttgttgcttaagctgttcttgactagcgattgcttgtaaagccgacaagtccgttgccaattcgcgttttaaatcagcttgacgttgttcattagcacggcgctgttgctcattggcaacacaactggctaattctgcggcggttgttaagttagcctttgctagcaatgctgtttgtgcagcgtcttgttctttaatcgtgtctgttaagcgtgtcacttgttgttgataataccggtaactctcgctgctttgtgcaaggtcttgtgtgagttgggtaatccgggctttgaattggctcacctgggacaagttctcttcatgactgccctgtaacgcccccacccaatcacgggcaaaagcaaacgcatcccaatacatatttagtgccgcttcgattgcttgattttcggcttgttgttgtttgagcgccatggtcaattgagtcatccggcttaaagcatgctgcatcgctaaaacttgactgattggcatcgccgtttcgtagccagtttgcgccaataataccgcgctttgttcgtgcatcgtctgcaatattgcttgttgtgcttgtaaggcagctgtcttggtttgcttttcagcctgcaacacatccaacttagcgagcgcttgttgccaagcttgtttttgcactggttggtcatggtcagattgtttattttgccacatcatgtaaccaccatagccaagtgcggctagtccaacgaccgcaatgactttcagagcgcccggcaagaaaagaccaatcatgaatatgactacgccaatcagcatactcaattgactggcacgtccatcagtcgttggcgtttcttgtggttcaacctgactaactgccgcgttttgcgtggctaattgcgcctctaaatcagccagttgcttggtcagcacttgactggtcgtggttgccccattcatttcagcttcggcttgttctagttgtgcgcgttgctcatctgtcaaaggatttggtagttgatccgtttgccattgatactgcgctgctaattgggctttttcgctagcgagttgtgcgctttggttttgccgtaatccaagtaattgaatttgtttttgctgttcatttaattgttcaaacaatggcaccaacgtctcttgattagcttgataaaatcgaaattcacctgtttgatccaatgtttcttgaacagttgctacctcggattttgcttctgctaacgcctttgcattgcgttctcgttcgaccactaatgcttggtattgttcgtcaatcgttaagtcaaacggcgttgccttttcaagtttagtttgaagtgcttgccattccgcataacttggccaacgatcaagcaaatgttgcaactgcgcttggcgttgttttaattcagccacttgcttttggtgttccgtcattgtcgcaacggtactctgcaatagacgtgcgttcgtttcatattcttgataaccacgactagcttcgttaacggattgcactaactctggataattcttcaaagcaacattcaatggccacttacgcccagagggtttgaaaattttctgactgtccttatccagttccttggcaaagtcgagccactcatgactccccaccgcaccaatcgtcaataaatgctgcaaaaaatcagcctgttttagattaaatatctgatttaaatcctgttggttcgtttcaaaaatctgcgtaaacaaagcttcatccgctggtgccaagaggtcagctaagtaatcagcgccaaattcttggccttgatcgatgaccgttacgtcgcccccaaacttaccggaaagccgccgaatcacaatatcgcgatcatgatagctaaccagtaattcaccaccgtattgtgcgccgtttttgggcacatattgttcataccgttgtttagcggtcgcaaagccgaataacacgcctttaataaaggctgtaagggttgtcttacccgcctcgttttgaccataaaggacttgatagtcggtattcaaatcaatcgtctgatcatgccacttaccgaagcccaaaatggtgactgtcttaattcgcatggctaatcccccatcttcttctcttgtagaattgtcgtgactaagtccttgagatccgcttgaaattctggtgtttcaattgcttcccggataaagttttccttcattaacggctttgctttttccagaatattgtccggtgtcaagatagctgcagccgcttgttcccagtaggcttggtcaatctgactaaattgctgttgtgctgcaaaccgcaacttcaacgcgtatggccaatgcagtggttcactattttccaattggtcttgtaacaccgccaataattcaccattattaatccgttgcaataagtcactcgataatcgctccgcgtgtgttagctctagcgccactaaactagcgtgatcactttgcatcaattgggcactcaaagccgtttgcaattgcgttaagctcatgtcaggtgtcacctcaaactgttgacgttgccactcaatgaccgtcgttggtttgaacgttaaatcgaactgaccatcgttggtatccactaaataaaagcctttttcaccaggttcattcttatgccgcccttgtaagttccccgggtaaacaatcgctggtcgttcttggagaatctggcgcttatgaatgtgacctaatgcccaataatcgtaatggcaagcgttcaattcactaatcgtaaatggtgcgtagtgatctgtatcggccgttgctttttgactaccgtgcaacgtcccaatcgtgtaagttgtgctggcacgttgtggaaaatcaaccactcgatcagctgacaaccaccgttgatcataactgaaccctacaatggtcacactctcatgtcctttggtagtcagttcaaacgactctacttgtgctccaaaaacatggacattggcgggcaattcaaaatgcacttgattggcatcccagtaatcatgattcccgtaactcagatagaccggaatgtcgacatctgccaaacgttcaaattgttgttttaaaaatttctgaactggcaaactctgcgcttcttgatcaaatgaatcaccaactaataatacaaaatcgacggcttcatcgatggctgtctgaattaattttttaaacgccgtgaaagttgacgcatggattgtttcccacaatgctgtcggtgcttgttttaatccgacaaacggactgtcgatatgggcgtcagctgcatggataaatttcatcttgaaaaaccccattcttttggccggtcgtaaccagcttagataagcttcattataccattgccacgcggtgtgataaaggcgattagaacaaacgttctgtttttaggcaataaaaaagcggtgaatcgaaatcaatcgattcaccgtttgaaacgtgcttctggttgcaacaacttccgcttaatttaaaaatcgcgttaatcctagaacctggattaacgcgatttttgtattaatgctcagttgctgaccgcaatcagtcacactcttatttgaaacgtgctttttgaaactgacttttccagttaactacaaaataagactgatgacaaaatacgccatcagtctcatttttaggttaatcctcaaagccaaacccgtttcaaacgcattctatgcttggtagatatctgcgattggttttgagatgatttggtttaattcatccattgtttggcttaattgacgttcttgttccatcaagttcttgattgcgtcgatatccccaattttttgagcaagttcttggatttctttaatttcgtcgtccgttaattcttgaccttgcatttgtttttgttgaagtgtcatttgttgcgtttggaatttcttaaacattgtgaaggcaatatcgtcttttttcaatgctgcaaaggcattttgtaagcctaaaaattgtggtaattcttgcaagtgcgttgccatttggttggcatcatcataaatattaactgtcattgtactgactcctttttccatgtatttaattgaaaaaacctttcaaattattataccattgattggctgtatctttcgctttatttatcccatctttaaaacccgattcaattgaatcgactaattcgttcgatgtcccactctgttcttttttcgccaacgattgagcatcttcagtatcaaagtccgtctgtgctgtggttggtaagagttgttgcatctcatatttaaagattggtgctaaaccgtcaatgctagtgttcttcataaagtgatcttgatccgtcttgtcataccccatccaagtcgcaacaacaatatccggcgtataaccgactaaccattgatctttggtcccaaagccataactatcaggcacttcagtactaccagacttccctgcgacttgatagccgttgggtttcgcataacgcccagtcccattattataaacgcccaacatcatgctagtcatttctttggctgttttttggctcataatccgtgtcttggatggttcggtattatcaacaatcacggcgccactcgcatcaacaatcttccgaataaaatgtgtttcagacaattcaccgttattcgcaaaagccgtataagcactggccatttggtaaggtgaaaccccaccttgccaaccacctagagccatcgccaagttttggtcactcttgggtactgaaatgccgaatttttcgaccgacttaatgccgcgtttgaggccgatttgatttaataaccaaaccgccggcgcatttgtactgttggctagcgcctgatacattggcatcgatccggtataaacgttatccgggttcgttggtatatagtggttagtcccatagctttgcttcttatcttcaagtgatgaatcatagtggtagccatcttctaaggctggcgtataaaccgccaatggcttgatggttgatcccggttgacgcttcatctgtgtaatgcggctataaccacggattgtatactcaccacgaccaccaacgacggctgataccccgccggttttcggatcaattgcaactgaactaccttgaactaaggtgtcatccgcagcgttatcagggaacaaccaattttgtttaaaggtggtttccatcttactttgttgggattggtcgagggcagtatagatcttgtatccgttcttaacgaggtcttcttctttcaacccaaagcggttaatggcttcattcacaacctcatcaaagtaatacggataacgatacccatccgactgctcgtaggtattcgtcacgacaagttgctctttcttagcagcgtcggcttgtgcttgcgtcaacttgttattatcgaccatcaagccgagaattaagttccgccgcgcagtcgcattatctaaatggtcagccggattatagaaactagggctccgcaacatcgctgcaatcacggcgccttcactagcatctaattcactcgcattcttaccaaaataccgttttgacgcatcctgaacgccccacaccccgttaccgaagtaggcattattcaaatacatcgctaagatatcctgtttggaatagaccttggtaatctgaacagctaagaataattcctcaaacttccgcgagaacgtctgcttctgactcaacttggcattcttggcgagttgttgggtaatcgtactcccaccaccggtaatctgcccatgatgaatcactaacccaactgctgctcgtgctagccctttaatactgaatccatgattggtataaaaggtccgatcttcagtcgacaaaacagcattttgaatctgcggcgatatcttatcaagatcgacataagtccctttttgcgaatataacgtccccgcgcgttcatccttaatgtcataaagcgccgttggggtttgtaagttggccttaatctcaccgacgttagccgtcttcgctttaaacgtgagccagctgctcatcgcgaaaatgagaattaaaacagcgagaatcagccatctcgtcaattgtagtcgataccagacataacgaatcacgcgccagacgcgtttcataaattgtttaatcgccaaccaaaacggcgaatcttgcttgttcatgcgatccctcttcttacggtcaaaattaatcttgtttaattgtagcatattcgtcaattgacactgatgccaatcgaagacattaacaatcttttaaaatttacttttacaccaattttcgctaaactaatagcttaaaggtggttgaactctaatgataatttaccaaaaaaaagtgactttagcgcccgactttagtccgatgtctgtccgcggcctgctgaatcactggttagtgccgcaaaaaatgcaacatttcttgcggattaatcaagatattttggtcaacggacattatctcgccttcaaccgacacgttgaagctggcgatcaaattacgatgaacttctcagaagtttccgttaaggtccaagactacgaacttgatgaacggcaatctttttccgttttatacgaagatgatgatttactggtcgtcaataaaccggcggggattaaaacccatccgaacggtcctggtgaaaacttcaccctaatgaaccaagtggcggcctatcttgctaaacaagataaaaaggcctacatggtccaccgcatcgatcaagcaaccagtggcgtgctcttgattggtaaaaccccaatcgtcatcggcattttaaaccgacagcttagtcaaaaaacaatgtcgcgccaatacatcgctattgctaacgatccggaacaaacactcttggaacatgcaacgattaacctcccaattggtgtcgatccatacaataagcgcaaacgcacgattgattacatcacaggtttatccgcagtgacccattaccaattactgcatcgaaaaggacctgcagcaaccttggcagtcaacctcgaaacagggcgaacacatcaaattcgcttgcacctggcggctgatggtcatcccattttgggtgatccgttgtactttccaaccgattcaacacagcgcctactactccacgggcaaacgttgcgctacacagagcccttcacggatgaacaaagaacagtaacagcccccatcccagacatttttaaccagtatgtagattaaagagtgagttatcagccggatatctcctgaggattaacacagaacatgtttagctcaacaaaataaggcgttgcgacaaaaaattacttttgtcgcaacgtcttatttgtttgcttatctcgctgttgctagatgttgtgcgaaacgttcgtttaattcggctgctagttcctcactagggctaatgataacaatcgtatcgtgacccgccagcgtcccgacaacttctgggtaccccaaatcatcgattaaggctgctaataaattcccgttacttgggagcgtcttaattacgtttaacatttgcacttgtgtaatggacaaagccacttcacgcagtttatcttttaatttctgagtttgggtgcgttcgtcatcgtgaaaaatcgtatagcggagctcaccgttcacatcccgtgccttaacgatttgcatctcccgaatatcacgtgaaatggtcgcttgcgttgcatcaatcccatcttgtttcaacgttgctaataaatcctcttgcgtcgaaacaacttgctgattaatgatttgttcgattcgtgcttggcgatctccttttttcacgactgccacccctttttaccttaattggctctattataccagtttttatcaaaattcgatagacagcgctttatataattcaaaaaagcgcatgttcataacttttttacccacaaaaaaagagcgccgattactcgtgtgcccttttaagattaagctttccgtgcttttcgtaccttaaatgtggttaaaattgcgaccgcaacagcaacccctgccaaaattgagaggaagaacaaaccaatattattggttgcacctaacaccccaacgattgggccaccatgtggcactgcatcggtgattttgaagaccatcccgactgcactagcaactgctgaaccagcaatgatacttgggaaaacttgttttgggttagctgttgcaaatggaatggcgccttcagtaatcccaatcaagcccattaagatagctggaatcccagctgatttttcttcttctgtataaagatcgcgacgaacaaatgttgcaatccccaatgccaatggtggaacagcaacggcacaagcaacagcacccatgatttgtggatgtccagccgtaatcgatgccaccccgaataagaaggccactttattaactgggccacccatatcaatcgcgaccatcgcaccaatcacaacgccaagaatcacactcgtttctggattttgtgaaagggtcgttaacatatcttgtagtgccgtcatcaaccatgaaataggtgcgcctaaaacgagaattaaaacggctgagataatcccaacccctaataacggaatgacaaaaattggcatcactggccgtaaatcttttggtacgggccatgaattaaaccatttaaccaagtaaccagccgcaaaaccaacgataatcgcaccaataaatccagtcccggcttttgtaccaaggatgtctgtattgttggcgaccattgcaccaatcattgcgggtgctaaagctgcacgccccgaaatagcataagcgatataaccagtgagaattggaatcattaaggtaaaaccaatcgtcccaatctgattcatactactccaaatggtatgtggtggaatcaccattcctgctttagtcggatgcccaccaatcgcgattgacaaggcaataaacaacccaccgacaacgacaaacggaatcatatgggaaaccccatttaataattgcttaataattggactttgttcatgactgtcctcttgtttagcttctgttttcggctgattcttgccataaatacctgccgttagtgctttttcaatcagtgtatcagaatctttaatagcttcagcggtcttcgcatatagtactggcttgccattaaaccgttcttccccatcaacggcaacgtcagcggcaataatcacgaaatcggcatcagccacatctgcggcgcttaattcatcctctacccctgaagcgccttgtgtttcaatcttaacttcatatccgcgagcttgcccggctttttgcagtttttcagctgccatataagtatgggcaatcccaactggacattttgtaatcccaacaaactttttcatcttctaaatcctcctagttaaattcgatttcatcgttaactaacgtgtagagtgccattgcatcatgccgattttgcttcaaattatgaataaaagcgtcatccatcaacttgcgcgcaaacttcgacaacacttttaaatgcgtcttattagggtcatcgagcggcataattagggcaatcgcgatttcaactggtgcgtcatctaatgcttcccaatcaacaccagtttcaaacgtgacaattccgacaactggttgagttaatcccgccactttcgcgtgtggaatcgccaccccattcccaaaaccagttgtgctctcagcttcacgcgcattgaatcccgcggttaatgcaacccgatctaacccattcttatcagcaaataattgcgctagtgttgctaatgccgtcggtttatcatccccaacaacgatatctgtaaaaatattttcaacatcaaattctttcatctggtaacactccattctaatttttctgattcaattgtgccaagatggcgagggcagccgtcccatcagatgcttgtgcgacttgctttaaaagacggggggtttcaatcaattggtctaaatcatgataaatcgcccgcatttggccatgaacagtttcgttcaaggccataaagaagacgagctgcactttgtcgttgtgttgccaattaatactttggggtgcaatcagcaacccaatggctggcttggtaattaattgtgaatccgcatgcggcaaagctactcgaccaagtgccgtacttgctaaagcttctcgggccagcgctgcctggacaaccgttggctttgcatacccttgatcaatgagccgctgaccaattaattcaattgcgccttgatccgttaactgctcttgcgtgacaattgtcagttcgggttgcaataaagctactaagtgattggtaggcgtcggttgttcagtaatcatctggcgaatgattccaatatcatgccgatttaacaaaggactgacttcaatcaccggcactgacaaacctttaatcgcaatcgtactgatgactagcgattccttaatcggggttgcaagtagttctcccaaggcaataatacgagtaatccgtaattcttgagcaaacgttttggccaaccgttgccctaataattgcgatgtcccaatgccactactacaaaccaccacaacactcaagcgtgcatcttctgaatgtcgttcaaaaaaagcttcaaagtgtaaactaataaaggctaattcgtcctcattcatttgaatctgatactgattttcaagcaccggctttagtaacactgcttgatcaaaggcttgcggaaaattctggcaaatttcatcagtatatgggttattaatactcaatcccattgcaagccggcgaagtgccgaacttaaatgaactgctaacccctgaattaattcctcatcaactgctaattgagcaagctgttgccgtaatagttgtggcagcccgactgattgccgcaactcggtctggatagtttgaacagatgtatccttcgattggaccgttactaaatgacggttgagatattcctgttcaaaatccggaattgtcaattcaaatcgccgttctaaaatctgtactaacagctgtgtttcggcaatgaacggtgtcaccactggttgggctccattgcttccaccagttggtgctggcatcatcagatgaatcgctaacaactgaaactcgtaatcagtaaatgatagcgtacttttttcaattaattccgttaaagctgtgagtatgtttttaatcaaggctggttcaaacagttgattcagattatccggtaattgaacatggcgcactaactgtccatttaactctttagcctcagtccgttttccccaatactgactgattaactccaccgttgcttgccgcttttgatgctcagaaccgattaaggataaaccggtatgcgtgattgccaattgaagaccgaattgcgcgagtttttgctttacctttttcaaatcattctcgactgtactccgactcacgtatagggtattagaaagttgttgaatcgtaatcgatgctgaacctaataataatttagccagaatgcaatgacagcgttcttccttggattggggacgatcattggcctttttttcaagatgattggctaatgtcgcgacatccccggtaaaataaataccgtcattcggttttcgaacgagtttcacattaaagggctctttcgatatcattcaaggtggttgcaatggtgcgctctgaaagctgtaactgtgcggcaatgtcgacatagtacgttttatgctgggccaaactatattgaataatagcgtgttctcgtttgttcatgcttatcgcaactcctcgtttcaatccctctacgctatctatagtctaatgtttatgtatccgcttgcaaacgtaattatttgcaagattattctggtaattattgcgcaatgctccataagcttttcttaatcaaccggttatgctggggattgtttatttagttgctagcctaatccaatccattaccttatccggtcaatttatcgcacaaaaaaagagcatcttaattaaaagatgctcttactagatatgttttgctcgccatattcaatggtaaccccctaagtcaaaagactacaaacataatcctttaacgccggctgttaaacctcaaaatgtgccgacacgaacatattcaattattttttgatattgtagaatgagttgatacctttgtatgaagctgtatcgcctaattgttcttcaatacgcattaattggttgtacttagctaaacgatcagtacggctcattgaacctgtcttgatttggccagcgtttgtagcaacaactaagtcagcgattgttgtatcttcagtttcacctgaacgatgtgaaacaacagctgtgtagccagcttctttagccatttcgattgcttctaatgattctgttaatgtaccgatttggttaactttaacaagaattgagttagcagcgcccatcttgatacccttacgtaggtaatcagtgtttgttacgaagaagtcatcaccaacaagttgaactttttcgccaagttctttagtgattgatgcccagtcttcccagttgttttcatcgataggatcttcgattgaaatgattgggtatttagcaactaagccttcaaggtatttaacgaattcaggtgttgtgaattcttccccagttgaccaacgtaatttgtatgtcttgtcttcgttgttccataattctgatgaagcaacgtcgatagcgattgaaatatcttcgcctggtttgtaaccagctttttcaatagctttgatcaagtattgtaaaggttcttcgttgtttgcgaagtcaggtgcgaaaccaccttcatcaccaacagaagtaactttaccgtcagctgataaaagactcttcaatgcttggaaagtttctgaacccatacggatagcttcgcgtacagatttagcaccaacaggcataatcatgaattcttggaaatcaactttgttatctgagtgagcaccaccgttgataacgttcatcattggtgttggtaatacgtgagcgttagggccgccaagatattcgtacaatggtaagcctaattcgtcagcagcagcacgtgcagcagctaatgaaatacctaagattgcgttagcgcctaatttacctttgttttctgtaccatctaattgaatcatagcagcatcgataccgcgttgatctgtagcgtcgaaaccaatgatttcttttgcaagaggaccattaacgttttcaacagcttttaaaacacctttgccaccaaaacgtgatttgtcgccgtcacgtaattcaacagcttcatgttcaccagttgaagcacctgaaggaacgattgcgcgaccaaagccgccatcttctgtgtaaacttcaacttcgacagtaggattgccacgtgagtctaaaacttcgcgacctaaaatatcagtaataattgacatgtaattttctccttttttggctaatgctaagcattagcgcttttttggatgtcaggcaaagcctacatctattttagctaattttacgccattcgtaaacaggaatgcgttaaaaattagtcgttaaagtgaactaagtctaagaatgaagcaggttccatacttgcgccaccaactaaaccaccgtcgatgtcttctttgcccatgatttctttaacatttgcaggtttaactgaaccaccgtattggatacgaactttgtcagcaactgtttggtcgtataacttagcaactgtttgacgaacaacagcacagatttcttgtgcttggtcagcagaagcagttttaccagtaccgattgcccagattggttcgtaagcaatgaccattgagctaacttggtcagctgaaaggcctttaagaccttctgttacttggtttgaaacccattcttcagctttgccagcttcacgtgtttcaagtgattcgccacaacagaagataggtgtcatgttgtttttgaagattgcgtgtgcttttttattgatatcttcatcagtttcgtggaagtaatcacgacgttctgaatgaccgatgatgacataatcaacacccatttcattcaatgtttttggtgaagtttcgccagtgaatgcaccagcatcttcgaagtaacagttttcagcagcaacttttaagtctgtgcctttagctgcttctaataaagcaggtaagtcaacagcaggtgcaccgataactgattctgtttgatcaaacttaggtaagttggctttgatagcattcacgaactcagttgtttgagttgggttcatgttcattttccagttaccagcaatgattggtttacgcatgagaaaatctcctcttaattttaaattatttgtctgaaatagcagcgataccaggtaatgtcttaccttctaggtattcaagtgatgcgccaccaccagtagaaatatgggttaacttgtcgccaacgcctaatttcttaactgcggctgttgaatcgccaccaccgacgattgttgtagcgcctgataagttacctaagaattcgccgattgccaatgtccctttagcaaagttgtccatttcaaacacacccatagggccgttccaaacaacagtcttagcatctttaaggacgttttcgaagtcagcaattgctttaggtccgatatctaatgccatgtagccatcaggaatgttaccttcaacaatttctgtcttagcatcgtttgagaatgcgtctgcaacaacgttatctacaggcaatactaatttgtcgccagctttttcgattaattctttagccaattcgatcttatcttcttcaactaatgagttaccaattgataaacctttagcagcgtagaaagtataagtcataccaccaccgacaatgactttgtcagctttagctaataaatgttcgataacaccgattttgtcagaaacctttgcgccacctaagatagcaacaaatggacgttctggagcgtcaactgcttcgcccaagaatttgatttctttttctaataagtaaccagcaactgcaggtttgttattagctttcatagctgttgcaatcccaacgtttgatgcgtgagcacggtgagctgtaccgaaagcgtcgtttacgaacatgtcgcctaatgatgcccaatattcgcccaacttaggatcgtttttactttcgcgtttgccaaagtcgttgtcgatgtcttggaaacgagtgttttccataaccaatacttgaccatcagtcatcgcattgattgcatcttctaatgctttgccttcgtttgaagcaacgaaagcaacgtctttgtttaataattcgccaagacgtgcagcaactggtttcaatgtcaattctttcttatcttcgtcactcttgatacggcccaagtgagaaagtaagattgccttgccaccattgtcgatgatgtattggattgttggtaaagcagctacgatccggttatcgtcaccgataacgccgcctttgattggtacattaaagtcaacacgtactaagacttttttgcctttaatatcttttaaatctgcaactgtttgttttgccatgtggacaaacctcctagattttcataaaaaaaggcggaaggagtttacctcctcccgccttataaaatgctatcgcattcctaagttcacaaaagtgaaattagattaagctagcaaatttttctaatgtacggatcatttgagcagtaaagcctgattcgttgtcataccaagcaacaactttgacaacttggcctgcgccaccgccaacgatttgtgtttgagtaggatcgaatactgaaccgaattctgtaccaatgatatctgatgaaacgatttgatcatcgttgtaaccaaatgattggttgccttctgtaactttcttaacagcagcgttgatttcgtcagctgtaacttctttgtcaagagttgcaactaattctgtcaatgaaccagtgataactgggacacgttgtgcgtggccgtcaagtttacccttcaagtcaggaacaactaagccaagagctttagcagcaccagttgaatgagggatgatgttagcagcagcagcacgtgcagcacgtacgttaccaccacgatcaggaccatcttgtaatttttgtgtagctgtgtaagcatggattgttgtcattgtaccagctttgataccgaaagcatcgttaactgctttagctaaaggtgctaaacagtttgtagtacatgaagctgctgagatgatgttatcgtcagctgtgattgtgtcatcattaacaccgtaaacaactgtcttaacagcaccagcaggagctgagataagaacttttttagcaccagcatcgatatgagcttgtgatttttcttctgatgtgtagaaaccagtactttcaagaactaagtcaacaccatcattcttaacccaaggaatattacgtgcatctgattcagcataaactggaatgttcttgccatcgataacgatgctgttttctgtagctgatacttcgtggttgaattgaccatgagctgtatcatactttaataagtgtgctaacatgtctggtgatgttaaatcattgatagcaacaacttccaatacatcactgtttgttgcgtaaatacgacgtaaagctaaacgaccaatacgtccgaaaccattaatccctacttttgtagtcataatagaatttcctcctttaggaaatgaaaaattttttattttaaagggttgccccttgtaaaatcgagtttgcggcaccttcatccgtgattaaccacgtctgtttaggtgcaaggtgcatgtacgcttggattgcttgggctttagaagcaccacttgcaaccgccagtacacacggaatattcaataagtcacgaatctgtaatccgattcgcggaatcttgtacacgacttcgccttgtgcattgaagaagtagccaaaggcttcacccaccgcatgcttttctttaagcatcttgatggtttcaatcggcatctcacgacgttcagccatcgcaatggcttcaccaatactgtgtaaaacaccccggcttcgttcaatcagttttaacacttcttgaacacttggttcttctaacaaaggcgcgtacgtcttctcactcacctgttcaggcacatacaatgcccgatgcttaccacctgtctgcttagccatttcggcacagactgcattggcctgaatatcaacactttcaccaattccccctcgagctggcacaaagattagattgcgctgtttcgatagatcagttgaaagttcatgagctgcttcagccatcgtcgttccgcccatcactgccacaatactttgcccttgtggtaataataattgtaacgtactattgactaatttgcccatttcggtgaggacttttggttgttcatcactattgccagaaacaatcaagcaatgttcaatgcctaagacttgactcaactgacgttcagtctgatgtaaccctaagaattgatccattacttgtcttaactgatcgagggtttcattccccttcacggttaaaaccatacctgatttagacgaattaagcaaaccttgtgctttcagaaaatccgtctcagttctaattactcgctcgctcatcttcagttgttccgcaagcgttcgtcggccaactggcgcgagccaatcgatatgttgtaacacctggtaacgtttcttaatgataccgacgaaatctggcgcaaccgcttctattgcagataattcatcgcgcaattgctatcgcctactttccgtgggacataaaatgtccatctgtgtcattagtcgacccatggttggcaaaaaataaaaggcaacttactaaaactagtaacttatccttttgaacaagaccattataacaagtgcagaaaacagatgcaatgctttggggttgatgaatacgttttctttccgaatattttttaaacgttgatttatcgcgatttatcaaaatttacacttgaaatttccgcttaactccgctaatataatatattgtactgttgagtacgcggaatgcgtcgctagtgtaatggatagcacccaagattccggttcttgagatccgggttcgactcccgggtgacgcatagatataccttttataccaacgattatcatcactttgtgtggttcttgtgtggtaaatgtaaaaagacctgtcaattttatgttggcaggtcttttttgttgtactccatatgtggtcaataataattgtcttttcctattacatactcaaaaagagaccacctaaattaggcggtctcttttctacgggttaaagcttatctttgaactgcaacgttttgaccgccaaccattaagcaaccacattcaaccatcttttgcatctgttcatctagttgcaccattatatcatgaattgtccttaaattggcgctaggttcatgccgacagataaacaagggcaagtcattccgagtgtaatagtagctcatactgccaaccaccccaataccctctttgtgtagctcaactttgccagtctcattcagagttaaataatattgctcattgatccgcgctggtgcaaattgttccatctgactcgctcccacttttgttctgttctcatcttacaacagataatttttgaattacattcttgacatggtatttatcgactattaattgcttgcgcttattaaagtggccaaaaattgaaattggtgcattctcttctgctaggtaaacgaagttaaacgcatctttagcgactagacagttataggattgctcatccgttttaagctcaaaccgcactagatacggggtaaagctgataactttaacggtgctgttgatcgtgccttttaaactaatgtattccatttcaaccactcctttgcgttttaattatacgaacatacattcgtatttgtcaaacgtttattgtataataattgcgaggtgatcagatgacgacactcatactcgttgccggttgttaaagaccggtttaatgaaccttataatttttatctagaagaaatggacggcgctacttacagtcatgggctgggagtggttgcctttgagcgggttgaggaatataagaacgtgctgcgcaaattacttgataacaatattaaagttgaatatcggcaattctagtatttttatagagaactattacgatataatagaataataaactatacacggagtgattaaatgaatccatatcgttggtacttaaataataaagacccgctagatttcttatcttttatcgttaaagtgatccttttctttttaatactatggatttcattttttaaaaactacacctactatgaagatataagcataaatcactatccaatcaatacagcccccttgtataagaatatttctgatgatatcaccctaaatgggacagaagatgcaaataaagttctgtacatatcgccagaaacgacacctgtgaaactaacgattgagaaatataatccctcacctattcctactggaagttataagccagttaaatctataaaaccggtgactattgaacctgggacatcttataaaattacttacttcgaaacagatgccatccctgagtatcaacttaaacttgaaactgatactggtaagtcaacagtttctatggcttttaatggtaaataccaagtaaacgatagataccggattaaagcaaaactaaaacttgtaccatttttgattaataggttcactaattaatatgtatgccctcataacgagggctttttttaatatgttaatgtttgaccgggatagatcatcgagttgatgctcttgccgtttttagctgctagtgtgtacatattgactcctagcttgttggcgattaaccagaatgagtcgccgtatcggactgtgtatgtgcggttagttgatgctgcaccagacaccttaattgtttggcccggatatagcattgtataaattgtcttgccgtttaatgcggccagattatacatactcatgccatgacggttggcgattgaccaccagctgtcacctgattggactgtataagttgaaccggacgttgtgttaccagtgttggtgctgataatttcaacgtcttttttgttggcccagctcatgacgccgtttaatagcacgcggttgccactgacttgaagcaccttgtaggattgacctttgataaaggttgggattgattcgccagtcgcccaacgttgcgctgagaagttaaccttgaccgtattaccgactttgatttctttcttggcagtgtcgtccgcctcttgacccgcatcggtggccggtgtttcagtcaccggattatcatgtttcgtgtaaccattgtcggtaatgcccgttaaatcaatgttaccgtctagaccgcctgcgatatacgttgatgtaaattggaaaatggcgataccagttcgtgatgggaaaaagttgtaattaggtttcggcgtcaccgcgtagttaggatattcggctaaccatagcttgtcgccaaacttggcaataacttgatcaacgtttaaatggttttgcaaataatcacggccaccgtataacattggtgtgtaacccgcatttttaatccgttgcatggcgtacataactaaatcggtattaacagcgtacgttgacgcgccctgttctaagtcaattgcaaggattgaaccttttggcgtttgcattttgcttaagacataatttaaagtctgatcagcggtggcgcgattatggatgttttcccaccaaaaatagctatgcgcccgcttaccctgagcgatggcggattggacttgcgtcttataagtccactgttcatagaggccattggcgttgtgcccaccaatttgagcaatcgcaaacttgtctgacccgtatccgaatttgccaaattgaccttgataaacggcccaatcgacaccctggtcacctttagaggcttgcgctaacccagttgatgcctgggcaaataaaatagccgtcatcgtggcgactactagtttcattgattttttcattttgaatctcccttcgtggtgtcatagacgacaccaattaagcctaagattgtaagcaccgtattaacgatgccttgtacttggctagctaaatcgttgctgaattcaattccgaaaactttggccacttgctgaactaacacaatgactagagctgtcagcgaagtccacaacacctttgaatgccaatctacttttttaatcattaattaccctcctattaatttttcaaataaaaaaagacctattggaatcaagatggctgtaatggctgtccgttgagtccatttagatctctcatttaagtctccaatatctttttgattttctttggcaatactataagccttttcaactttggttgcggtcgaatctagatgcctagtatttgtttcgacgcgtactaggcgctcacggatgtcaatgagcatctctgtcacgtttaaatcttctttctcattactcaaaccatgttattcctcctacagtattaatttaaatgcaataaaaatagcaatccataatgggattgcttaattgttagaaaaaaatttagcgatttttcagcaaatttccgataaccttcatcattcggatgcgatgcgttctatcccttccttatttgctcatatttgcagctagcggcctaatatcgtgatataattatgctttggaggcgatgctatgaaaaggttaaagctaatgtttattagacatcttttaaacaaaacacctgaaaaatctatgctttttgaagtgcaacagaaaagttagacaaaattaaaattttaagcaactaatgtatgttctcggtattctgccggggacatattttttgttttcaaagaaatgcgtcgatgattaaaccattcgacgtattctttagaaagttgtgtgagctcagaaatatccttgcaaggtgggaatccatttaaacattctgttttataaagatgaaaaaaactttcgattggggcattgtcgtgacaatttcctttacgtgacatactttgaatgaaattattatttttaagtttttcagtgtagtaatttaattgataatgccatccttgatcagaatgaattattggttgcacagattcaggtagcttgataatcaactcgttcagagttgatattatcaagctactattaggactatcatttattttaaatgctaaaacctctttactagcctcatccgtaatagcagaaatatacgcccaactattatctttcaatcggacttgtgttacgtccgtatgtagtactttgtagggcaatgtctcattaaaagtttgtttcaagatgttgtctgagattcttccaacattgcctttatatgaagagtatttgccattcttatgacgattatacatagatacttgaacgtttaattcatccattagacgacgaataacagtgtcagacaaatggatatttaactttaaaagttctttttgtactcggcgataaccgtaggttagccggcctcgaaattttccatcttcagtaatcttaatgatttcttttttcacatccgcatacttgtcttgataatttttaagccttttacgctcgtcatgataagtagccttcttaatgcctatggcattaagaatatcacctattttatatctatcggatttagataattcgtcttggtcagccctgatctgatctactatttgtgtttttcgtttccctttgagggtccgaacagggtcactgatttttttaggatatcacgttccaatttagtgtcataaagttccttgtttttttctgcgagttcctctcgtagacgttctacttcacttttgtttactaattgacgtaattgctttttatttcgtttcattttggtcggtctacctttcggacgaggcttcaaacctaatataccttctcgattaaaagtagtgcgccaaatactaatttgacatggtataagatcgaatttagcggctacctcactttgtgactcgtcatgagtttgatagtagtctatcacatctaatttaaactcggcagaaaattctcgtttaacatttctacgtttaagcgaatctacaccgcttaaacgatatctttgaatccaatgagcaacttgtcttctaggcaaatagtatttttcggcaattcctttggcactaatatttccttgaagatactcaccaactatcttagcttttaaactagaactgtatttgaccatataaaaagagctccataactgttagatttcttgtctaactattatgaagcacttcattttgtactcaaaatattggggattaaagttggaactggcgcctatatttgccagcctgattatattgacactgataatattacaattggtagtcacgcttttattaatcatgatctgtatatctacactcgaaactatcccggaaccggtataacaattggggaccacgtttttttagggccaaaagttaaattattgtgtgtcggccacaatatcggaactgctgaacaaagggctggaatccacaaagaagccccaattattattgaagatggcagctggattggccttaatgcaaccattatgcccggtgttacaattgctaagggttgcgttatcggagctaatgccactgtgaccaaatcaactacccctaatggcgtttacgttgggactccagcaaaaaggattcgtgatttagactaagccctattagggctttttttattgtctagaaagaatataaccttgctgaatatctccttgcgtcataataccgcttactgcggtgttaactccccaatccaacaccgcgccgtctgcataaaatgtccacacaaaaaccctaatatcattttttgagtatttataaaaatcgtctcgatttgatcccgcttgaacactagctataatttcgttcgtatcatttctataaggtaacatcttggctaggttatcatcagcggttgtttctttgccaaataaaaaggccagttttgcctttggatctagtgcttttaaatgattaaagcgcgacgcttcaaagctttgccaaataatattacgttgcatgccatatttccagaccagccccatcacagtgtcgatttgtgcgtcgcttaagtcgattttaagttcaagcactagttttaggtttgctcgtttgccgtatttaagtaggtcttccaaagtcgccattttcgtgccaatataagcgtccacacgtcttttttcgattaatgaataatcatacatgtttaacgtcgcaagagtattgtctgccaccttaatcgtgtcagtgatcgctgtcccgtcatcattaaccgcagtcctattgattgtttcatcgtggattaacactggaatattatctgatgtgaagtgaatatcggtttccacatatttgaaccctagtttttttgacatcttaaacgccggcatagtattttctggcgcaaaatcgcttgcccccctatggttaatcgcaatcacatttgcatacgtatcttcttcataagttgaattaggaagaccgttaatcgttatttctgacggggaagttatgatcgcctgtctcgttgaagcatttttgtcagtagaattatctctgatgatcgcaattgtatagtcgttaaattttaaaggagcgtcgattctttggaatttaaaactattgtcgctctctgaataaataagtctggcatatgttgaagcaccgctttctgccactgtattaataaccgttacgttatcttccataaccacgccttttgagtcttttaacaacaaaaagactttaggctcgtatgaatttttaagcgtaaggcgtttttgagaattaaaatcaaaaacatgggttgagtcgttatagtccggtttaaaggtcggcgaaggaacaatcttagcccaacggtcgtgatcactaggataatctccgttaattaaaaccgggaaattggcgctaatgagtggttttcctagttcaccccccaatctgcgcgaacactcattatacaaatttcggctggttcataattattatcccaagagataaatctaaacgacaacgattctgtattaaacatgagcctcgtcgccgtgtagtcgttttctggcgtgttaatgattttaagcccttttgggatttgaaatctgtgaatacttccccaagcaattagcgctagcttagggctatcgccaaacgtgaacgttctcgtcgattggtcataattgggaatctctccgccaacaatcaagctgtagccggataggacgctttgcactagtttatcccccgtgatcgctcctgcagcgattttttgttccgttattgatccattttcaacgcttccgataaccggtgcttttccagccattgcagcttgaacctcttctgaaagattaattaaccctagtttagcgccgtcgttgctggtgtccatatctgctcgtttaatcttagtagccgtgttacgctttacggataattttgcatctgtttcagattttaaagctgcgatttccgttttatcagctttattggcattaataacagcaatagcattgtcctgcgcgtcttcgcgaatgccgagcaactcaaaattgctacgagctgctacgacttctgctgattgattgccgcccgtttcttgcataattttaaccaatgcttccccttgctgggccatcgcttcccgggtatcttcgccataagttttgtggcgcatcgctttactgatttcacttagtgattgcaattttgaattatcgaacggcgttggatcacgataatctactgtatctcttttgatttcatctgccactatttattacctccttctaacgcagttatgcgcttttcaaaatcttcattggcagtttcttgttttgtatttagcgtttcttgatttgttttaaattcctctaaatcaagcacgttttgaccaatctcaccgagggtggtaatgattgtagtcgtttgattctctagcttggtcaatttggctatgattgctttgaaatccgcatcaccgatgttctcaattaacttgtcgtactcggtttgaagcctggttagattctcggtcgttgtggcaagttcggtggtgatggcggtgactttggtggattgaagtgccaccttgactttcatctcttgaatagcgacctcgtttttcaacttaattgccgactcgtagtcttcctgacttagcagcttgtcgccgattgagagtgttgagctgagtgggttacacaaatccagcgactggccgacaatccgcaagcgctcattaatgcccatcaaaggattaattgtgcgatggtaattacccgcttcaaacgtatcaatggtcttatctgttaaaagactgaggtcaaccgcgctcacttggaactgctctttgatcagccgttgactgtccagcatggcttgcccttttgatttcaggattgacgtaactttcacatcgtcccaaacctctggatgcacaacacggccaatctgatcaaccaacttttgcgagactaaaaaaggactgccagcattgacagtctcaatcgttaatcttggttgtgatatttcggaatctccctcattggcttgcgtcgtcgtttcagcccttgcacctaggggcttgataatcgaatacatagcgctgggatcaatcgaccttttgatggacagcagattgctcgctaatcgaatctcttgattgctttgaatggcaatctcgggcatgtagtcgaggtacaacccgtccggttcgtggcgcagtcgaatctcaccaccgtacttcgtgatcagcttatctttaatggtctcgtaggtcgtctttgagtcatcaatcgacttgtagacattatcagacgggctagtcactgtaacttgccccagcttgatttttttaaacgcatcaacttgacggttatgcacatcaatcatgtgttgcaagaacgacttcaagtcgttgtttgctagcgcgtaatagtcctgcgttgaatcatgtagaaacgccagcaagccttcacaggtaatttccttgttaaactcgccactagtcgccatcgaatcggttgttgggagcacacgcccttcaaatagcacctgattgcgcttgggaatcgtcactttgacgaacgtcgtcatccctttaaagtcgttgtaatagggtgactctgggctaatgctaaattgaaacgaatcaattgcatcgatgtcccgcataatcttagccgttaaaagcttggtgtcgttcaggttctccgaatggattgtgtgctccgtgccgtcccagccatctcttaccgtcacccgatacatattagatcaactccttatgccaattaaatgctagtttacccgtgccaatcacggtgatggtaatctcaccggttggcaacataaaatccggactgcttgacgtgccagcgttaagcgtaaatcgttgtccgcctacttcaatcgtgaacggcgcactggcgatcagttcgggcgagatagacgtggctccgatgttaaacagcgtaatggtgcgtttaccgacgatatcaaactcagtattctgcgcgatatccgtttcgaagttgaattcgtcccaaatgtcgttgccttccgccagttcatcgatgcggaacgggtaacacgtaaattcaaccgacaatttaccataggcgcgcatctcatcccatgagggttctttctgcacctcgcccaggtaataatagttgtgcatgatgtcgtctttcagcttcactttttgcgccggtgccatcaaccaattaacgacctgcgtccataacgaatatagacgctctttggattggtcttctccatcacgcacaataaacgtgattttcatggtgcgctccttatacgtctggccaccgtatagatcactgatatccaagacggtgttgctaaacgggattgcctgcgtgattttattcttggcgggcatccccaccgttttggcttgcacgtccaaaccaaagtcgttggatctgtgcccattgaattcaatcccgtatgaatacttagattttattgtcaattgcaactccccttgcttttagttgattacgacgtgctcgttctgtcgacccgtattcttcatacgctggagaaaatgacgaaccatcgactacagtacgtttatcggcaatgatgcggagtaagtcaagcatttccgcgctgttggctacgtcttgggttggtgctgaataggtgttgtaaaccgttggcgttgggcgcatcatctgcgcgaggttgttgccagtcaaagcggccggttcgtcaaatgcaatggcgggcgtcattgataggctcaacttgtcggccatacctgaaacggttgattgaaccgcacgaaatgcatcttgcaaactcttatttaatccgcccatgattgcactcccggctgggactaacaactttgcatcgtaactaattggacctttatgctccttaatccaaccagcaataccgctaacgaatcctttgaccttttcaaatgacgcctgtaatccgccaagaaatccattcatgatggcgtgtccggcgctgcttaaattaatgttaccgagactaccgaagattgacttgatgctacctacgatgcctgaaatagttgtctgtgccacacgaactgcaccagtaatgccagcccaaacacctgaaatcgcggctctaagcgctgacccggctgcttgcaatccactccaagcggctcgaatgccacttactgcaccactaatcccaccgccagcaatcgacactgaggacttaatcccagaccatattgcagacaacattgacccaagtgcggagcctgccgctctcagtgatgtccaaacacccttaatgatttcaattgtggctgagataccactaccagcgaccgaaatagctgatttaatcccgttaaagctatcggagataatagctctcaaggtggtgctgacaccacccagattgccgaataatccgacaagttgaccaatccaactggctacagtcgttaataccggcgcaataaagttgaaggcggcgaccagaacttgaataaccggcgttaaaaatccgattgcaattcgaatggcatcgaatgcgattgaaatactcgacaagatgcttttgaacaccccgcctaaaaaggcgcccactatttgaagtgctggcattagtgcactggctaatactgaaatgagtggttgggctgcattccacaatccgacaaacgacgtgattacatttgaaatcgctggaccgataacgcccatcattgtgctaaagccggcagtaacagctggcacaatcgccgacactaagttttgcaagccactgaagtcaagtttggtaaatgcgtcaccaatcatttctacaattggtgtaatcgcacctacaacggttgtgaatagtgctggcagttgtgtaaagattgtacccaacgtacttgagataaccggcccaattgattggaagattgattgcaatgctgttttaactgttgaaccgaattgcgttaccgttgacataatgccacccaatgacgctgtgacagcactcgggccacccgccatgccttgcgttaatccactgatcaactgttgcccacccgccataaaactcggggcggcatccgcaatgaatgtcgtgattgcgccaggtagcgcctttaaaatgttaccgaccattggaatgaagttgttgaacaagaatgttgatgttgtttctgccaaagcttgtagcgatggcccaatatcttgacccagtgacaacttaccaagtacattggacagtgaagccttcatcgattcaaacgaaccactaaacgtgctggcggcttccttggcggttgtgcctgtaatgtccaattcgccttgcacaacatggatagcgttgtaaacgtcggctaaattgctcatgtcgtatttctgcccggagattttttgcgcatcggttaagagccgttgcatttcttccttagtcccgccataaccaagcttcaagttgtcaagcatggtgtagttctgtttagcaaagccttggtaggcgtgttgaatgtcgccgatactcgtccccatcttgttggcattgtcggacatgtcaatcatggccatgttaccaatgtcggccgccttttcggtgtcaccgccaaccgattggagcaagctggcactaaagctcgtcacgttttccatgtaggcattcgcagataaaccggctgtcttgtacgcttcattggcaaagccttttaccttatcagcactgcccttaaacagcgtctcaatcccaccaagcgattgttggaggtcggcaccttccgacaatgatgacgagataattttcccaagtgtggcaccaacggcggccacacctgcgattgcggcaagcttaatgccggtgccaattttggagccggcactcttacccgctgaatccgcctcaggatctaactgccctttgatggcaccgctaaggcctttggctgatggcacaatttgaacgtatgcttgtccaagctcagtcgccatttggtccacctcctatgattaatctgtttctaattcgttcgaaatcctcgccagaatcaaaagtgactgccgaatctgcagattgctttttctgattgcccataacggcatctaggattgattgcggccttttggcaccgcgctcagcatctttagaccgcgaccacaacaacaggttcacagcatctagaatccccatgagcacttgcgtattgactggcactgcttgctggttcatcttcaatttgatgcgtgaatcattgcgcaagttacacgaaaaagcagccaccgttgataacggtagctgctgatagtcgtatatttggtaggtttcagcgagatcactgattaaggcatcttcgtccagcttaatcatcttggcaaggatcattagttttttgtttgtttttgactctgtaaaatctctttgatttcatccgccatcgcttcgggtggcacaatgccatcaagttttcgcacatggtttttcaaccgcttagcaccatcatcacccaaaagtaatttaattactctgggcaaggccattgcatcatcttcaagctcgctaagcgcttcaagcagttcataattttctaactgctcttttgagattgaaaatttaaatcccgatttcgtttttccttcctggatacaaaaatattaataaaaaatgcggaagtagttcagtggtagaacatcaccttgccatggtgggggtcgcgggttcgaatcccgtcttccgctttttttgtacccgtaataaaatagtttccgggaagtagctcagcttggtagagcactacgttcgggacgtaggggtcgcaagttcaaatcttgttttcccgactctcaaagacttgttgatgacaagtctttttttgtgcgtccaattgattagctactaaaagtcagtaaactttcattttgtactgataatcgttataataatagtcaacgttagtcaaagttaaacttttgacactgaaaaacgcagaagactaaatgaaggggctgatatgtttgcaaagtcagaacatctcggatattattgaagcctatctaaaaaagatactggctgacaatgaacaaatcgaaattagacgctccgaaattgctaagctttttaattgtgtgccgtcccaaattaactatgtgattaatacgcggttcactgagcagcgcggttatgtcgtgaatagtaagcgtggcggcggtggttatattcggatcgtcaaggttcaatttctcgatgatcgggactttttagaagcgttaattgaaaatgttgatacgcagatttcccaggcggacaccttagccattatccagaaactatatgatgaacaaattctttcgcaaaaggaaggcaatttgatactcgcggcaacgagtccacagacattagcggttaataataaacaattagaagagcagcttcgagcacagattctagttgcagtgttagaacgactacgatatgaaattaagtaaagagtgggggattatccatgaataatctatttacaccaagtgcaaaaaacgtcttaatgatggcacaagaacaagcaaagaaatttaatcaccatgcactaggaacggaacatctcctattagcaatcgtattagaaaatgagggaattgctgggactaccttacgcgaattaggtgtcaattcgaccgatgtccttgaagaaattgaacgcttaaccggatatggcgatgctgtaatcgcttctggcattagcggttatttaccatattcgcccaaagccaaacaagtactcgatattgctcgggttgaagcgcaacaagctaattcggttaaaattggcacagcacacctattattagcacttttacgtgatgatgatattatcgctgcgcggatcttattgaacttaggacttagtttagctaaaacacgccaactactacttcaaaagatgggtgtggatacagcaaccgctaaaaaacgggctaaagcagctaagaataatgccgatcaagctgggacaccaacgttgaaccaattagcgcgcgatttaacacaacttgctcgtgacaatcaaattgatccggtcgtgggtcgtgatgaagaagttcggcgacttgtgcagattttagcccggcgttcgaagaataatcccgtcttagttggtgaacctggtgtcggtaagacagcgattgctgaaggttttgcgcaacgcatcgtcaatggcgatgtgccaagtgacatgcagcaaaagcggctcatgatgctcgacatggggtcattggttgctgggacaaagtatcgtggtgaattcgaagatcgtttgaagaagattatcgatgaaatctatgcagatgggcaagtgattctctttattgatgaattacacaccctcattggtgcaggtggcgctgaaggggcaattgatgcttctaatctcttgaaaccagcattagcgcgtggtgaattacaattaattggtgcgacgactttagatgaatatcaaaagtacattgaaaaagatgcagctttagagcggcgattcgcgaccgtcacggtcaatgaaccaacgccagaagatgcggaacaaatcttaaagggattacgtccacgttatgaagctcatcatgggattgcaatttcagatgaagctttacatgaagcggttgtcttatcaaatcgctacatcacgaaccgattcttaccggataaggcaatcgatttaatggatgaagcgacggctaaagtgcgattggatgctgttaaccagaagacaccgttggataaattagaacaaaaactacaaactttaaatgacgataaagaagccgctgttcgcgcgcaagattttgaaaaagcggcgacgattcatgagcaagaagtaaccactaaggccaagattgccaagttacaagctgccgaacaagaaaacggtgttcgcagtgacattcaagtgactgctgaagacatcgctcaagtggttgcgcaatggaccggtgtgcctgttactcagttgcaacgcaaagaaagcgaacgtctcatgcaacttgaaaaagtcttgcataaacgggttgttggccaagaagaagccatttctgccgtttcacgtgcgattcgtcgtgcgcgcagtggtttgaaagatccaaaacgaccaattggttcatttatgtttttaggcccaaccggggttggtaaaacagagttagccaaagcattggcggaagccatgtttggttctgaagacaacttgattcgggttgatatgtctgaatatatggaacgttacagcacgagccgtttagttggggcggcccctggctatgtcggctacgaagaaggcggccaattaacagaaaagctccgcaataaaccatattccgtcattttatttgatgaagttgaaaaggcccaccctgatatcttcaatatcttgttgcaagtcttggatgacggctatttaaccgattcaaaaggacgtaaggttgatttccgtaatacgatcatgattatgacatcaaacttaggtgcgacagccttacgtgatgataaatccgttgggttcggggttaaagatgtaactgctgattataaagcaatgcaagggcgcattatggaagaattgaagaaagctttccgtccagaattcttaaaccgaattgacgaaacggttgtcttccattccttaacacaacctgaattgcgcgaaatcgtgaagattatggcgaagaatgtcttgggccgtttagcggaacaagggattcaaatcaagatgacagctgcagcgatggatgttgttgccaaagctgggttcgatcctgaatatggggcacgaccaattcgacgggcgctacaaacccaagtagaagatcagttgagtgaagcgttgcttgctggcgagattacgatgggtgtaccggtgacaattggcgcaactaaaggtaaaattaccattaccagtaagactgataaagtaactgtttaaacgtaaataaggtgtcagaccaattggtctgacaccttatttttttgccctaaaagggtcgtgagctgttcaatttcagttttaatcgcagcgccgatattcgtttgactgacacgttgacgttgactaacttgatcaatcactcgacgcgtggaaataatgtcttgcatcttggcaattgcattggctcgtgtggtgaacggctgatgggtgactaactgcattccatacgaattgtacaggagcgtaaagccaccaatgccagttgtgtggtgataagcttttgaaaagccgccatcaatcacgatcattttgcgattagccatgattggattgtggccttttttgacaggtgtgtgaccattgagaatgtgccccgtttctggcgttaagccaaactccaacaagagtttctcaatgaagtcttcctgatggcggagttggtaatatgcgttcttcttttcttcgtgtaaaacggggtcggcgctgaagtagcgttcgaaggtcgtcatcgcgttcttgccaaatagtggggagagcggtcctgtccacaggtaccagagtaaatcggtggataaattatcttgattgagcgggtggtcgaagctcattcgaatttggtgatcgaagaagtcgagtaatgatttaccagcgtattgtcggttagcgagggttaacgtgaggaagttgccggcttcatcaactggaatacagccgtgaaaaaggagattctggttgtagagttggtacatgctaccgttgtcgattaaaaaacgcagatgcttgcgtagtttttggcagtgggtaaacgcgtttagcaatgatgtaacaatggctgcttcaccggaagttaatatttctgggtgggtggggtcgactgtttgaaagcaggtgttatcaagtgggtagtcatgaccatttagatgaattgtctgctgttcaaagtcaacatggctgagggttaagcggtggtccattttgaaatcaggattgcgtttaatcacggtttgttccaacttaaactgcatgatggcgatggcttggtgcacttggttgatgcttttcttttcagctgttgagattgcgggttgattggcagcaacctttggttcgaaggcgggattgggctgataagttcgttgggcaaactgaaccagttcgctaaggtcaattccgtaagctttctcgatgatggctaaattattgtagcgtgcgcaaatgcgtaaaaggttgagcatacatagttgagaaccgctagcggcgccgaaccagagaatatcatgattgccccactgaatatcaaccgcggggagcttggtgagttgttcgacaatcagatcgggacgcggcccacgatcgtaaatgtcaccgatgatatgccaatgatcaaccactagtcgttgaatcgtatgactggtggcgataattaaggcatcggcttggcccatcgaaatgatggacgtcgtgatttcttggaagtagcgtttcttatcgctgttagctacatcgccgtacattaattcttcggtaatgtagacgaaatcgggcgccattgctttacggacttttgagcgtgtgtattttgtggagacaaattttaagaggtcgattaaccgtttaaaagtggtgaggtaccactgatcgagttcgctagcagatagttgtgcgtgtttgagtgcaagccgctcggttgggtagtaaactaaaaaagcgaacgcctgcattgtgtcttcagtcatttcaccggaaaagacctctgcaattttttgccggagattccctgcgccagtgcgaatgagatgctggaaggcatcatattcgccatgtaaatcactcatgaaggcttcagtgggtttggggaggttcaagatggcctttaagttgatgatttcggaagtaattgccattttagtggggtatttttcggataacgttttcattttattgttaatcattcaccaaactcctttgataaactaatagttcgattataccaatcataaatataaatgcaaattactttgtttaaaagctttttattagtatataccaattaaaaagtcgcgcagtttagcgcgacttctggaaactattgatcttggatggtgccatcaacgtggcgctcaactttcatttgcgtcattgggatgtagcccagtttagggacgattgtcttttgaacgtcttttgattggatgaagtggatgaaacgggctgtttgatagttaggtgcgcccttagtatacatatgttcgtaagaccagattggccatgcattggttgaaacgttcttttcggtaggctcaacgtcgtttaacttaacggcttgcaagttacctttgatgtatgggaaggcgaggtaactgatagcgcctggcgtttgttcgacgattttttgaacagtcccagaggaatcttgttcttggctggtaacaactttgtcggttttaagacctaatttttcaaacgtttgacgtgtcccacttccttgggcccggttgataacggtgattttttcgttaggaccaccaacggattgccagtttgtgatttcgcctttaaagatgcctagcaattgtgcactggttaaatttttgatgcctaactttttattaacaacgggtgcgattgcaaccacagcaactttgtgatcaacaagtttcttagcatcgataccatctttttcttcagcgaagatgtccgagttaccgattgtgacgttgccaccactaatttgggttaaaccagttcctgaaccgccaccttgaacggtgacgttgactttagggttatccttttgatattgatcgccagcttgctcaacaaggggttgaagggctgtcgaaccaactgcagtaattttagcgccttgatcctggctttgacttgcactttttgattggccttgacaaccagctaataaaagagcggccgcaccaactgtgagtaatgccatactaatgcgtttcataatgattcctcctgaggactgatttaagggtacaagttcagtatagagacgtcgtgtaaagattgaccgctaattcgtgtaaaaaacgtaaatgataagtcgcgagtttgtaaatgattccgtgaggggcttgaagattgtcattagagacttttgttaaaagggtgggtaggcgatacagccataaaatgctatgattaaatgagatagttagaaatggagcaaatacataatgttatttattgcgatgatctacttgtttgtctgtttaccttttttatgtgctattgtccaacgcaatgatcgccaatttattcaattagttggtatgttgatcaatttggtgcttgtattaggattaacgattttagtgacttttgggttgactggtcatgttattcattttagtgatggtttgttccaaaagttatttttactcaagtttattatgttgattaccattattcaaggcgtcgtgttggtgacaagaaggtggcgccaaaaatggttaatatttgaactggtaccagtcacacgcacaagacattggtttagctggtggatttttagtggtgccttattaatatcagttgggtatttcttgttgtcagctagtttttggacaaaggcaaattttggcttgttaacgcccgagcagatagtttataacttacgccaaccgatgacaggtgttgacgatggttttattaattcatttatcggcggtccggtgctaggtgccattacttgtttaatcagcgtttttttgttctgcaactatatcagacacttgcaactgttggtcactcataaaataacacaccacttagaactcaaggcaaaacgatttgtattggtcagtgcgttattgttttgtggtttgacgacggttgctgcgattaaaattgatgctgttggtttttacgaatatctaacggcgaattcaccatttattgaagaaaattatgtagcaccgaataaaaccaaattaacgttcccaaaacaaaaacgaaatctaatttatatttatgctgagtcactcgaatctacagcaacatcaagagaaatgggtgggcagatgaaaaccaatttactaccagaattgacggcgttagctgagcaagagggtgttcacttctcaaattctaaccgatcatttggtggtgcccaacaattaccaggaacaggctggacagttgcgggaatggtcgcccaaacatcaggattaccgttgaaagtgccggtggatgggaattcctatgcgacagataaaaagaatcatttcctaccaggcgtcacgtcattaaataatattttggacaagcacggctatcagcaaaaaatcttgcttggatcggatgcgacttttggtggtcgacgatcatattttacgcagcacggtaatgttcaaattgatgatttgttaactgcgcgtaaagatggtcggttacctgaagactattatgtttggtggggctatgaagattcaaagttattcgaatacgctaaggaaagtgcgttggagcttagcaaatcagatcagccatttaacttaacgatgctaacggagaatacgcaccacattggtgggtatccagaaccgaatatgccagaaaagtatggtgaccagtattcaaacgttatcgccttttctgatcatcaaattgttgaatttattaagtgggcacaaacgcagtcgttttatcagaatacgaccatcattgtcaacggagaccatttaggcatggatgtggagtattataagaagattccggccaataaacggcatgcatttaatttgattttaaatgcaccaaaagcaagtcaggttcaaaccaagaatcgccagtttagcacaatggacatgttcccaacgacgctcgccgcaatgggggttgatattaagggagaacgtttaggcttaggaactaatctattttcaacgaaaaagacattaatagaagaaaagggattgaaaaaggttgataaggccttgagcgccaaatctaaattttataataatcaatttatctatgataagtagtaccgaggcagattattgacttttagtagtaaaagaagtatattatacagtaactgcgaaaatccgtagaaaaatttattgtgctgatctattgtccagcacggtattcatgaaaaacaaaaatagttagtctgatttattcagcttaaaataactgtttttgttttttttctgctcaaaattatcaaaaaatggcgatgtaatattttcttaatatttgtcatatttttgtaacaatgaggctgcggaaaacttatagaggggtgaacaatttggcaggacacttagtgaattacggtaaacatcgtactcgtagaagctacgcacggattaaagaagtgctagaactaccaaacttgatcgagatccaatctaattcctatcaatggtttttagacgaagggcttcgtgaaatgtttgatgacattatgccaattgacgattttgctggtaacttatcattagaattcgttgattaccaacttcttgaacctaaatacacggttgaagaagctagacaacatgatgccaactactcagcaccattacacgttactttgaaattaacaaaccatgaaactggtgaaattaaatctcaagacgttttctttggggacttcccattgatgactgaccaagggactttcatcatcaacggtgctgaacgggtaattgtttctcaattagttcgttcaccaggcgtttatttcaacagcgctgttgataaaaacagccgcacaacttatggtacaactgtcattcctaaccggggtgcatggttagaatttgaaacagatgctaaggatattgcatatgttcggatcgatcggacacgtaagattccaatgtctgttttagttcgtgctttaggttacggttctgatcaagaaattatcgatatcttaggcgacaacgattcattaatgttgacgttagaaaaagatatccataagaatactgacgactcaagaacagaagaagctttgaaggatgtctacgaaagacttcgcccaggcgaaccgaagacagctgatagctcacgttcattactttatgcacgtttcttcgatgctaaacgttatgatttagctgctgttggtcgttacaagatcaacaagaaattaagcttaaagacgcgtttattgggtcaaacattagctgaaacacttgctgatcccgatactggtgaagtgattgctgctaaagatacagttgttgatcgtcaagtgatggatgctttggcaccatacttagacaaagaagacttcaagacggttacttaccaaccatctgatgaaggtgtcttaccagaaccaatgacactccaagtgatcaaagtgtactcacaaaaaacacctgataaagaaatcaacttaatcggtaacggtcatatcgatgccaagattaagcatgttattcctgctgatatcatcgcttcaatgaactacttctttaacttacaagaaggtctcggttcaacggatgatattgatcatttagggaatcgtcggattcgttcagttggtgaattgttacaaaaccaattccgaattggtttatcacggatggaacgtgtggttcgtgaacggatgtcaatccaagacacaagcaccgtgacaccacaacaattgatcaatattcgcccagttgttgcctcaattaaggaattctttggttcatcacaattgtcacaattcatggatcaaaccaatccccttggcgaattgacgcataaacgtcgtctatctgccttaggacctggtggtttgactcgtgaccgtgccggttatgaagttcgagatgttcactatacccattatggtcgtatgtgcccaatcgaaacccctgaaggccctaatatcggtttgattaacagtttggctagttacgctgttgttaaccgttacggcttcatcgaaacaccatatcgccgtgttagttgggatacgcatgatgttactgataagatcgactatttaacagccgacgaagaagataactatgtcattgcgcaagccaactcaccattaaacgatgatggttcattcgttgatgatactgttttagcacgttacaaagatgacaatattgaaacttcaatcgacaagttagattacatggacgtttcgcctaagcaagtagttgctgtcgctacggcctgcattcctttcttggaaaatgatgattcaaaccgtgccttgatgggtgctaacatgcaacgtcaagctgtgccattagttgacccacatgcaccacttgttgggacagggatggaatataaagcagcccacgattcagggattgctttattagcacaacatcccggaactgttgaatacgttgatgcgaaagtgattcgcgttcgtcgtgaagacagctcattagatacgtacgaattaatgaaattccgtcgttcaaatgctggtaagaactacaaccaacgtccaatcgttgcaaaaggcgatcacgttgatgttgatgaaattatcgctgatggaccagctatggaaaaaggtgaattagccttaggtcaaaacccattgattgctttcatgacttggaatatgtataactacgaagatgcgatcgttctttcagaacgtttagtgaaagaagatttatatacttcaatccatattgaagaatacgaatcagaagctcgtgatacaaaacttggacctgaagaaatcacacgcgaaattcctaacgttggtgaagattcattgaaggatcttgacgaattcgggattgtccgtgttggtgctgaagtcaaagatggcgacattttagttggtaaggtaacgcctaagggtgtgacagaattatcagccgaagaacgcttattgcacgctattttcggtgaaaaggctcgcgaagttcgcgatacatcattgaaagtacctcatggtggcggcgggattatccaggacgttaagatctttacgcgtgaagctggcgatgaattgtcaccaggtgttaacatgatggttcgtgtttacattacacaaaaacgtaagatccaagtcggcgataagatggctggtcgtcatggtaacaaagggactgtttcaatcgttgttcctgaagaagatatgccatacatgccagatggtaccccagttgatatcttattgagtcccatgggtgtgccttctcgtatgaatatcggacaagttcttgaattacatcttgggatggctgctagaaacttaggcatccatgttgcaacaccagtctttgatggtgcgcaagataaagatttatgggacgctgttcgtgaagcaaacatgccttctgatggtaagagcattctttatgatggtcggaccggtgaaccattcgatacacgtgtgtcagttggtgtcatgtactacatgaaactagcccacatggttgacgataaactccatgcacgttcaatcggaccttactcacttgttacgcaacaaccattgggtggtaaagctcaatttggtggccaacgtttcggtgaaatggaagtttgggctcttgaagcttacggtgccgcttataccttacaagaaatcttaacttacaagtctgatgacgttgttggtcgtgtgaagacatacgaagcaatcgttaagggtgaaccaattccaaaaccaggtgttccggaatcattccgagtattggttaaagaattacaatcacttggcttggatatgaaggtcttggatatcgataatcaagaaattgaattacgcgatatggacgacgatgatgatgatatcgaaaacatcgatgcattatctaaatacgctaaagaacaagaagccaaaaaggcacaagaagaagctgaaaaagcacaagcagcaaatgctgatgcagtagatccatctgctgaataaagcgtgctataaattatgaggaggtcggccctttgatagatgtcaataagtttgaaagtatgcaaattggtttagcatcttcagataaaatccgtagttggtcgtatggtgaagttaaaaagccagaaacaatcaactaccgtactttaaaacctgaacgtgatggcctttttgatgaacgaatcttcggacctacgaaagattgggaatgtgcttgtggtaagtacaaacgaattcgttataaaggaattgtctgtgatcgttgtggcgttgaagttacacgttcaaaagtgcgtcgcgaacgcatgggacatatcgaacttgcagcaccagtaacacatatctggtactttaaagggattcctagccggatgggtcttgtcttagacatgagccctcgtgcattggaagaaattatttacttcgcatcatacgttgtgattgatccaggcgatacagccttagaaaagaaacaactgatgaccgaacgtgaatatcgtgaaaaattagatgaatacggtaatcgttttaacgctaagatgggtgctgaagccatcaaagaattgttacgtgacgttgatcttgaaggcgaagttgctgaattaaaggaagacttgaagtcagcacaaggtcaaaagagaacgcgtgctatccgtcgtttggacatcttagatgccttccgtaaatcagggaataaccctgaatggatggttatggatgctattccagttattccaccagatttacgtccgatggttcaattggaaggtggccgttttgccacatctgatttgaatgatttgtaccgtcgtgtgatcaaccgtaacaaccgtttgaaacgcttgttagacttgatggcaccaagcatcatcgttcaaaacgaaaaacggatgttacaagaagccgttgatgctttgattgataatggtcgtcgtggccgtccagttactggacctggtaaccgtccattgaagtctctttcacacatgttgaaagggaaacaaggtcgtttccgtcaaaacttacttggtaaacgtgtcgattattctggtcgttccgttatcgatgttggtcctacattgaagttctatcaatgtggattaccacgtgaaatggcacttgaattgttcaaaccattcgtcatgcacgaattagtgaaacgcgatatggcttcaaacattaaaaatgcaaaacgtaaaattgatcgtcaagatgacgatgtttgggatgttttagaagatgtcatcaaggaacgcccagttctattgaaccgagcacctacattgcatagacttggtatccaagcattcgaaccaatcctggttgatggtaagtcaatccgtcttcatccattagcttgtgaagcttacaatgccgatttcgatggggatcaaatggcgatccacgtacctttatctgatgaagcacaagcagaagcaagaatgttaatgcttgccgctcaccatattttggcaccaaaagatggtaaaccaatcgttacaccttctcaagacgttgttttagggaactactacttaacgcttgaacaaaaaggtagtctcggcgaaggcatgatcttcaaagatacaaacgaagttttaatggcttatcaaacaggtcacgttcatttgcacagtcggattggtttgtcagttgttgatatggataatcgtccattccctgacgaacaacgccacaagattatggtaacaagtgttggtaaagtgatgttcaacgaaatcatgccaactggcttcccatatttgaacgaaccaacaacagataacttgatgaatggtgtgccagataaatacttcatcgataacggtgaagatattcatgactacctctcaagtgccccagtgatcttaccatttaagaaaggcttcttaagtgatatcatcgcgcaagtcttcaaggtatataaggttcaacggacatctgacttattggatgatatgaagaccttaggttacgttcaagcgacccatgctggtttaacagttggggttgccgatgttcctcaattacctgaaaaacaagaaattgttgatgaagcccataagaaagtcacaacggtttctaaacaattccgtcgtgggttgattacagatgaagaacgccatgcgcgcgttattgaaatctggaacgatgctaaagacgatatccaacaacgactcacagattcgtttgatccaacaaacccaatctcaatgatgtctgattctggtgcccgtggtaacatctctaactttacgcaacttgctggtatgcgtgggttgatggctgctcctaatggtgggatgatggaagttcctgttacatcaaacttccgtgaaggcctctctgtcatggaaatgtttatgtctacccatggtgcccgtaaagggatgactgatacggcgcttaagactgccgattctggttacttaacacgtcgtttagttgatgttgctcaagacgttatcattcgtgaagaagattgtgggactgatcgtggtcttctcattcactcaattcgcgaaggtaatgaattaatcgaaccattgtatgaccgtcttgttggtcgttgcgcaatgaagaccattgttaacccaacaacgggtgaagtgatggttcaacgtaaccaattaatggatgaacaacttgctcaagctgttgttgatgccggtgttgaagaagtcacaattcgttctgtcttcacatgtaacacaaaacacggtgtctgcaaaaaatgttacggtcgtaacatggccaacggcgaagaagttgaagttggtgaagcagtcggaacagtcgcagctcaatcaatcggtgaacctggtacgcaattaaccatgcgtaacttccataccggtggggttgccggcggtgaagatatcactcaaggtttgcctcgtatccaagaaattttcgaagcgcgtaatcctaaggggcttgcaacaatcactgaagtaactggtgaagttgttgcggtggaagaaaaccctgcagaacatacacgtgaaatcactgttcaaggtgaaacagatacacgttcatatagtgtgccttacacagccaacgtcatcgttaacgaaggcgacatggttcgtcgtggttctaagttaacgggtggttctgttgatcctaaacaattaattaaagtccgtgacgtcttatcaactgaaaactacctcttgcatgaagttcaaaaagtttaccgtatgcaaggtgttgaaatcggcgataaacacgttgaagttatggtccgtcaaatgctacgtaaagtccgtgtcatggatccgggtgatacagaaatcttacctggtacattaatggatattagtgaatttacagaccgtaaccacgaaaccttaattagcggtggcgtacctgctacttgtcgtcctgtcttgcttggtattacgaaagcatcattggaaacaaatagtttcttatcagccgcatcattccaagagacaacacgtgtcttaacggatgcttctatccgcggtaagagcgatccattacttggtttgaaagaaaatgttatcatcggtaagattgtcccagctggtactggtatggcgaagtatcgtcatatggaacctaagacagtcggcgctgtatcagaaaatgtctactcaatcagtgacatcgaagcacagatgaaagaagaaacaaaagaataactgagtgccaatttagaacagttgctctaaattgcacgttaaagggcctcaccgacatggtgaggcccttttttatgtgtttgcaataaacaaaacgattaagacaccgtagctgatatacgggacaaatggaattgggcggcgtccgactaaggcgaggacaactggatggtggagactatcaatgagatatttgattaaacagaggagacaggcaattaataacatggatagggtgacctccaatccaaaccacaacccaagaattgccaataattcaatgtcaccagtaccgatgccatctgaaaagtagttgatgacagataaggtgctgccaatcaatagggcactgagccaatggtttgtcggccagtagtcaataaacaaaggcataaaagccagtaccattggaactgggtatagagctgtatggaaaatatcgactaggctcaacaaataaaggataagcaataaatagccaatctgtggtgtgaaatattgactggctaaacaacacgctaacaagccgccaataacctcactagtaaaaaaatggtgctggattcgagtatcacaatagcggcagtgccctctgagaatgaggtaactgataattggacataagtcgtaccaagcgagggcgtgatggcagaagtcacaccgtgaaccaggccatgtgatggataaaccgagtggccaacgccaagcacaaacagttaaaaaagaggcgcaacacgcgccaataacaaaggttaaaaaatatattaacaaacgtgtcatctcctttatgataactacaaaaaaagggcgcaactttttctgaaaaactggcttatagcacgttgactttcgtagttgtgcatgctattcttgtagatgtgctttttacggaagttttctgatattcagacatgctgactgacgtctaaaaatgcattacaatccacgcaatctaggttgccatttttttatcgtaaaaaaagaaccacctggatgtgtggacttaaaactcaaaaataactttcagatcaaggaaggaggaaccttcaaatgccaacaattaaccaattggtacgtaagggtcgtaaatcaagaacttcaaagtctgatgcacctgcattaaactttggctacaacagtatgaagaaaaaagctacagataatccagcaccacaaaaacgtggggttgctactcgtgtgggtactatgacacctaaaaagcctaactctgctttacgtaagtatgcgcgtgtgcgtttatctaacttaatcgaagttacagcttatattcctggtattggtcataacctacaagaacatagtgttgttcttatccgtgggggccgtgttaaggatttacctggggtacgttatcacgttatccgtggtgctttagatactgccggtgttgacggtcgtatgcaaagccgttctaagtatggtactaagagacctaaaaaataacacacaaaaaaatttgaaaaagtcgattgaagtttaaatgacactgtgtgttacttcaaggacttaaatatcttgaggaggttatcaggatgccaagaaaaggctatgttgcaaaacgtgacgttttacctgatccaatgtacaattctaaattggtttcacgcttaatcaaccgcttaatggttgatggtaaacgtggtactgcgtcaacaatcttatacgatgcatttgatattattaaagaagaaactggtaatgaaccattagaagtgttcgaagaagctatgaacaacatcatgccagtacttgaagttaaagctcgccgtatcggtggttctaactaccaagtaccaattgaagttcgtccagaacgtcgtacaactttaggtttacgctggttagtaagctatgctcgcctacgtggggaacataccatggatcaacgtcttgcacgtgaaatcatggatgctgccaataacactggtgctgcagttaagaaacgtgaagatacacataaaatggctgatgccaaccgcgcatttgcacattatcgctggtaagattaacaaggttggctgttatatgtattcaaatcatataatggcctcttgttgtatatagcttaatattcgagaggagtaatattcacttatggcaaacaaacgtgaatttccgttagacaaaacgcgtaatatcggtatcatggctcatattgatgctggtaagacaacaaccacagaacgtatcttgtactacactggtaaaatccataagatcggtgaaacccacgaaggggcttcacaaatggactggatggaacaagaacaagaacgtgggattacaattacatcagctgctacaacagctgaatggaaaggtaaccgagttaatatcattgatacaccaggacacgttgatttcacaatcgaagttgaacgttcattgcgtgttttagatggtgcaatcactgtcttagatgctcaatcaggtgttgaacctcaaactgaaaatgtttggcgtcaagcaactacttatggtgttccccggattgttttcgttaacaagatggacaaacttggtgctaacttcgattactcaatgacaacattggaagatcgtttacaagctaatgcacatgctgttcaaatgccaatcggcgctgaagatgaattccaaggcgttattgatttgatcgaaatgcaagctgacatctatgatgaagatgaattaggtgctaagtgggatacagttgatgtacctgctgactaccttgaagaagctacaaaacgtcgtgccgaattagttgaagctgttgctgatgttaatgacgacattatggacaaatatttagaaggcgaagaaatttctaaagatgaattgaaagctgctattcgtcaagcaactatcgatttgaaattcttcccagttttcgctggttcagctttcaaaaataaaggtgttcaaatgttaatggatggtgttgtagattacttaccatcaccattagacgtacgtccttataacgctaaaaacccagaagatgattcagaagttgaattgatggctggcgatgacaaaccatttgctggtttagcatttaagattgctactgacccattcgttggtcgtttaacattcttccgtgtttatactggtacattacaatctggttcatacattttgaatgcaactaaagacaaacgtgaacgtgttggtcgtttattacaaatgcattcaaatcaccgtaacgaaattcctgaagtattctctggggatatcgctgctgcaatcggtttgaagaatacaacaactggtgattcattgactgacgttgatcatccattaatcttggaatcaatggaattccctgacccagttatccaagtttctgttgaacctgaatcaaaagaagatcgtgataagttagatcttgctttacaaaaacttgctgaagaagatcctacattcaaggctgaaaccaacaatgaaacaggcgaaacgcttatttctgggatgggtgaattgcatttggatatcatggttgatcgtatgagacgtgaatttaaagtggttgccaaaattggtgaacctcaagttgcttaccgtgaaacattcacaaaacaagcatctgcacaaggtaaattcgttcgtcaatccggtggtaaaggtcaatatggtgatgtttgggttgaatttacacctaacgaagaaggtaaaggcttcgaattcgaagacgctatcgtcggtggtgtggttcctcgtgaatacatcccatcagttgaacaaggcttgaaagaatcaatggcaaacggtgtcttagctggttacccattgattgacgttaaagctaagttatatgatggtagttatcatgatgtcgattctaatgaatcagcatttaagattgctgcatcaatggcattgaagaacgctgctaaacaagctggcgctgaaatccttgaacctatcatgaaggttgaagttattgctcctgaagaatatcttggcgatatcatgggacaagtaactgctcgtcgtggtgctgttgaaggtatggaagcacgtggtaatgcccaaatcgttaatgcaatggtaccattgtcagaaatgtttggttatgcgacaacattacgttcagctacacaaggtcgtgggacatttacaatggtatttgaccactactcagctgttcctaagagcatccaagaagaaatcatcaagaagaacggtggccaataagccgctaatcttaagtgattggtttcgattggaaaaggactcgtcattgcgacgagtcctttttttgtgcgtaaaaatgcgattttacagtttcgtaaatgaaagttcatatttaattcataactggttggtattctgtatacatcagatgaattcctcccaagaaataatctgaaaaggtaaaaatgcttttcaaggtggttagcttttgagcataacatagcgaggataatgagcaacgaaggtgatcgttgtcttcgcgtagttaggcggaaaaagttaccttgaaaagcaagattaaatgaattttcattagacaattcctccctaaagaatccgtctaagtaaagcaccaccaatgagttatagtttaatggtaaaacgaaccggcccatttgaaattcctcccaagaacagtgaatggttttctggtgattgatagagacttgctttcgaaggcgcaaggatttgttgatcattaagactggttcatgcgggttcaatccccgctaactcgatttgccaccgccctggcaaaaaaactcaaactctttttcatataaacttctccaaaaaagggagttacgacaaaaatcacttttgtcgtaactccctttttgtgtttctaggcacggcttactgagttagttttgttttgtaggacgtgttttcaaactgcccatcagacgtttaacctttgcttgttcgatttcgcgggcggatagttgactatagtccgcttcgatagccagtttattgaaatcagctagccgttcaggcattaatgaacctgcatcgattgcggctcgtacggcgcaaccgggttcgctttgatgctggcaatccttaaatcgacagtcctgtgcgagcgtctcaatatcagtaaagactgtcttgagtgccttagacatgctacttgtcatgccgagttcgcgcatgccaggagtatcgacgatgaaggccccgctagcagtttgacaggcttgtcgattggtggttgtgtggcgccccttatcatcgtcagcgcgaatgccgctcgttaaaacggaaggctctttaatgagctggttgatcagggttgatttaccaacgccggatgagccgacaaatgtcacccattgtccagctgttaaatacggtttgaaagtcgctgcaacatttgatgccgtctggccagttgtgatgacgggaacgctgtcgaatgtcacacttgcgatggcgtcaagaaaggttgttagctcagagtcgctgactaaatcggttttactcaaaacaatcaccggtgttgcgccgctatcccaagccatcgttaaatagcgttgtaagcgcgcttcgctgaattcttgattggcggatgttacgatgaaaatcgttgcaatattggccgctaaagtttgaatccgttgttgcttattactgttgtgtcgttgaataagcgtgtgccgggggagatgtccttggatttggaaataatccgtatcatagatcacgccggttacttgatcaccgacaacgggcaggtcgttagtgctttctgccaagtggcgataccgaccgctgattgttgcggttaattcttgatgattgagtaggactttgtaatggccttggctttgaaaaattaaaaaagctgtttgttgtgtttgcatgatgatgcgcctccagtgtgttatttcatgatgatctaaatgaaataatggcggcactggctatctaagcagcgaataccgccattgatagcacaattgctgtgtttgtttttaacataaaaagaatctcctttatatagaatgggtacattgtcccgtcatttaagataacagatgatcgttaaaagtcaaattagataattgtagctccgaggctgtttttaaaatgcgcgagtgcccattcttgcccgttcggtgtaaaagttgcgacagcagcggctggaattgttagtgggtaatttaagttgtatgccgagactgcagtgtggagcacgcaaatgtcggtgcaaacgccagtcagtgttaacgcgtcaatctcgcgctcgcgtaagaaattatccagattagtgttagcaaatgctgaatagcgattctttgcaaatgcatagacgtgaggatcggtttggtgcttggtgtaccagctagctagtggtccgtaaaactcatggccccaagtattggctagattatgtggtgggaatagggcgctctctggatgaaatggatcatccttgacgtgtaaatcagtcggtaagatgacgtaatcaccggctgctaggaactggttagctaattcgataattacaggaacgattttctgagcgggtttgccggctgtcagagcaccgtttgggtcaacgaagtcatttgtatagtcgataatcaaaagtgcgttatgggacatgataaggacctcctggaggggatttaagttgctttcagtgtatcaaaacatggctagaaatccacgaatgacgcttgctacaagatttatgaaaatgttatgaaaaactttgataaatcagcaaaaaagggttgcgttatcgggttgtatcttgtaagatagataaagtgctatttccatagcaggagtgcgcaccatggtagtcaaaaagattaccgagtagctaagatgtgagaggttgcgacacacccggccgctttgccatgggcgggcgtgccggaaaaattttcacggagctagtctacttttaaaatagacgaaggagggaaaaacatggcaaaacaaaagattcgtattcgtttgaaagcattcgaacaccgtattttggatcaatcagctgacaagattgtggaaacagcaaagagaacaggtgctactatctctggcccaatcccattaccaactgaaagaacactttatacagtgcttcgttcaccacataagcataaagattcacgtgaacaattcgaaatgcgtacacacaaacgtttaatcgatattgttaaccctacacctaagacagttgattcattgatgaaacttgacttaccaagtggtgtagatatcgaaatcaagctttaattcgtaccaaccaattaaaaatactagaaaagaggtgttaccatgaccacaaaaggaatcttaggtagaaaagtaggtatgacacaagtctttactgaaaacggcgaattaattcccgtaacagttatcaaagcaactccaaacgttgttttacaagttaaaacaaacgaaacagacggctatgaagccatccaagttggttttgaagataaacgtgaagtcttgtcaaacaaacctgctaaaggtcatgtagcaaaagcaaatactactcctaagcgcttcattagagaattcagagatgtcgcattaggagattacgaagtaggaacagaaatcaaagttgatactttcgcagccggcgacgtcgttgacgttactggtgtaacgaaaggtcatggtttccaaggtaacattaaaaaagacggacaatcacgtgggcctatgggtcacggttctcgttaccaccgtcgtcctggttcaatgggtgctgttatcaaccgtgtcttcaagggtaaattattacctggacgcatgggtaacaaccaacgtactgttcaaaaccttgtggttgtaagtacagatgttgaaaagaacgttatccttgttaaaggtaacgtgccaggtgctaaaaactcaatgattacaatcaaaacagctgttaaagctcgtaacaaataatctgagaagggaggattttaccaatggcaaacgtaacattatttaaacaagatggtagccaaaatgggaacgttgaattaaacgactcaatctgggctatcgaacctaacgaaaacgttgtgtttgatgcaatcatcatgcaacgtgcttcattaagacaaggaacacacgctgttaagaacagatcagctgttcgtggtggtggtcgtaaaccttggcgtcaaaaaggtacaggtcgtgctcgtcaaggctcaatccgttcacctcaatggcgtggtggtggtaccgtatttggtcctacacctcgttcatacagctacaaattacctcgtaaagtacgtcgtcttgcaatcaagtcagtactttcacaaaaggttatcgacaatgatttagttgttgtagatgcattcaactttgacgcacctaagactaaagaattcgctgaagtacttaacaagttagacgttaatactaaagcattggtagtacttgaagacggaaatgattttgctgcattatcagctcgcaacttacctaatgtaactgttgtagctgctgatggtatcaacgtattagacgttgttggcaaccaaaaattaatccttactcaagctgctctttctaaaattgaggaggtgcttgcataatggaagcacgcgatgttattttacgcccagtagttactgaaaattcaatggctgcaatggacgacaagaaatacacatttgatgttgatgttcgtgccaacaaaacacaagtgcgttacgcaatcgaagaaatctttggtgtaaacgttaaaaacgtaaacatcatgaacgttcgtggcaagttaaaacgtcaaggtcgctatgctggctatactaaaaaacgccgtaaagcaatcgttactttaactgctgattcaaaagaaatcaagattttcgaagattaagcaacacttaaatagaataattataggagggtatacacgtgggaattattaagtacaaaccaaccacaaatggtcgtcgtaatatgaccagctcagattttgctgagatcacaaagacaacccctgaaaagacgttgttggaatcccaaagccatactgctggtcgtaatgcacatggtcatatcactgttcgtcatcgtggcggcggtcataagcaaaaataccgtgtcatcgacttcaaacgtatcaaagatggtatcaaagcgactgttaagtcaattgaatacgatccaaacagaacttcaaatattgcattaatccaatatccagatggtatcaaagcatacatcatcgcccctaaaggtcttgaagtaggcatggttgttgaatctggtgtggatgccgatattaaagtaggtaacgcattaccattagctaatattcctgatggtacacttatccacaatatcgaattaaaacctggtaaaggcggccaattggttcgttcagctggtacatcagctcaattattaggtaaagaaggcaaatacgctatcgttcgtttaacttctggcgaaacacgtatgatcctacttacatgtcgtgcaacgatcggtactgttggtaacggtcaacacgaattaatcaagattggtaaagctggccgtaaacgttggatgggtatccgtcctacagttcgtgggtcagtaatgaaccctaatgatcatcctcatggtggtggtgaaggtaaagctccaatcggtcgtccttctcctatgtctccatggggtaagaagacgcttggtaagaagactcgtagtagtaaggctcgttcagagaaacttattattcgtcatcgtaaatcaagataatcaattccaattgaacatgtctaaagccaatgcggcttaaacataagtcacattgaactttttattcgaaggaggtttcataatgagtcgtagtttgaaaaaaggaccattcgcagacgcacacttgctcaacaagattgaagcacaagccgatagcgaaaagaaacaagtcatcaagacttggtcccgtcgctcgacaattttccctagctttattggctacacaatcgctgtttatgacggacggaaacacgttcccgttttcatctcagacgatatggtaggccataaattaggtgaattcgtaccaacaagaactttccatggtcatggaaatgacgataagaaaacaaaagcacgctagaaaggaggatgaatctcaatggcagatcaaattactagtgcaacagctagcgcaaaatcagttcggatggcagcccgtaaagtacggatggtagtcgacttgattagaggcaagagcgttgcagaagcaattgcaatcttagaatttacaccaagagctgcttcaccagtcgtaatcaaagttttgaaatcagctatcgctaatgcagaacataattacgacttagatgcagaaaacttggtcgttacagaagcttatgctaacgaaggaccaacattgaaacgttttcgtcctcgcgctaaaggctcagcatcaccaatcaacaaacgtacaagtcacatcactgtagttgtatcagaaaaagaagcataaggagggatatcgcgtgggtcaaaagattaatccaaccggttttcgtgttggcgtcatccgtgattgggacgctaaatggtatgcagaaaaagatttcgcaacattcttacacgaagatcttaagattcgtaaatatatcaacacaaaattagctgacgcatctgtctctactattgaaatcgaacgcgctgcaaatcgcgtgaacgtttcaatccatactgctaaacctggtatggtcatcggtaaaggcggttctgaagtagaaaatctacgtaaagaattaaacaacttaacaggtaagaaagtacacatcaacattgtggaaatcaagaaacctgatttagacgctcacttagtaggtgaaggcattgctcgtcaattggaagcacgtgttgctttccgtcgcgctcaacgccaagctatgcaacgtacaatgcgcgctggtgctaagggtattaaaactcaagttgccggccgtttgaacggtgctgacatgtctcgtgtcgaaacacatgctcaaggaactgttcctttgcatacgctacgtgcagacatcgattattcatgggacgaagccatgactacttacggtaaattaggagttaagacttggatttatcggggcgaagtattacccgctaaagccaacaacaatacgaaaggagggaaataaacatgttagtacctaaacgtgtaaaacatcgtcgtgaattccgtgggaagatgcgcggtgctgcaaaaggtggcaaagaagtcacttttggtgaattcgggctacaagctttagaatcaagttggattaccaaccgtcaaatcgaagctgctcgtgttgccatgactcgttacatgaaacgtggtgggaaagtgtggattaaaattttccctcacaaatcatacactgcaaaaggtgtcggcgttcgaatgggttcaggtaagggtgctcctgctggatgggttgctgtagtaaaacgtgaaaaagtcatgtttgaaatcggcggcgtttctgaagaagttgctcgtgaagcattacgcttggcatcacataaattgccagttaaaactaagatcgtaaaacgcgaggaagtaggtggcgagtcaaatgaaggctaaagatattattgaattaaccactgctgaaatgcttgaaaaagaacaccaatacaaagaagaattattcaatcttcgtttccaacaagctaccggtcaattagaaaataccgcccgcttaaagcaagttcgtcagaacattgcacggattaaaactgtattacgtcaacaagaacttaacaaataataaatggaaaggagctatttactttgagcgaagaaagtcgtaaccatcgtaaagtgtaccaaggccgtgttgtttcagacaaaatggataaaacaattactgtcgtggttgaaacttataaaacacatcctgaatatggtaaacgtgttagatattcaaagaaatattatgcacaagatgacaacaacgaagcaaaagttggcgacgttgtgcgtgttatggaaactcgtcctttgtcacgtacaaaacggttccgtttattagatgtcgttgaaaaagcagttattatctaaatcgttactcaatatatatataagtgacggaaggaggacctataagtgattcaatcagaaagtcgtcttaaggttgctgataactccggtgcccgcgaaattttaactattaaagttttgggtggttcaggtcgcaagactgctaacatcggtgatgttatcgttgcaacaattaaacaggcaacaccaggtggcgttgtcaaaaaaggtgaagttgtcaaagctgttatcgttcgtactaagtcaggtgctcgtcgtgcagacggttcttacatcaagttcgacgaaaacgctgctgttatcatcaatgatgacaagactccaaaaggaacacgtatcttcgggccagttgcacgtgaattgcgtgacagtgatttcatgaagatcgtttccttagcgcctgaagttctataattacagacaaccaaggaggtgcgtatatcaatgttcgttaaaactggtgataaagttaaagtaatcagtggtaaagataaaggtaaagaaggtacaatcatcaaagctatgcctaaagaaggccgtgttgttgttgaaggtatcaataccattaaaaagcatgttaagccaaatgctcaaaaccctaatggtgggattgttgacacagaggcaagtatcgatgcttcaaacgttatgctaattgatccatcaaacaacgaagctactcgtgtaggtttcaaagtgattgatggtaagaaagtacgcgtttcaaagaaaactggagaatcaatcgataaataatcttttggggaaaggaggcactttttacatgactaaccgtttaaaagaaaaatatgttaaagaaatgacaccagcgttgatcgaaaagttcaactacacatcaagcatgcaagtacctaagatcgaaaagatcgtacttaacatgggtgttggtgatgctgtttcaaacgctaagaatttggataaagctgttgaagaattaggtttgattgctggtcaaaaaccattaatcacaaaagctaagaaatcaatcgctggtttccgtttacgtgaaggtatgccaatcggcgctaaagtaactttacgtggcgaaagaatgtacgatttcttagataaattagttaacgtatctttacctcgtgttcgtgattttcacggtgttagtgcaaaatcattcgatggtcgcggtaattatacattaggtgtacgcgaacaattgatcttccctgaaatcgattatgataaggtagatcgcgttcgtggtttggatgttgttattgtaacaacttcaaatactgacgaagaagcacgcgaattgttaacacaatttggcatgccatttgctaaataaaaagggaggtcaatttcttggctaaaaaatctttagttgtaaagaatcatcgtccagcaaaattttcaacacaagaatattcacgttgcgaacgttgtggacgtccacattctgtatatcgtaagtttaagctttgccgggtttgcctccgtgaattagctcataagggccaaattccaggcatgaaaaaagcaagctggtaattataaagagtcaataaggaggttaattccacatggtcatgacagatccaatcgcagactatctaacacgtattcgtaatgccaacatggtacatcacgaatcattagaagtccctgcttcacgtatgaaaaaagaaatttctgaaattttgaaacgcgaaggctttatccgcgattacgaagtgattgaagacgacaaacaaggtatcatccgtgtattcttgaaatatggtaagaataacgaacgtgttatctctggtttgaaacggatttcaaaacctggtttacgtaattacgttaaagctaatgatgttcctaaggtattaaacggcttaggcatcgcaattatctcaacaagcaacggtgtcgtaactgacaaagaagctcgtgaaaaggctgccggcggcgaagttctcgcatacgtttggtaatctaaacttaaaataaggaggtgtcataacgtgagtcgtatcggattaaaagtaatcgaagttcctgcaggtgttaccgttactaaagacggtgaaaacatcacagttaagggacctaaaggtgaactaacacgtcatttcagtccagtgattgaaatgcacgaagaaggtaaccttatcaactttacacgtaatagtgaaagtgatcgtgcaatgcacggtactatgcgtgctaacttaaacaacatgatcttgggcgtaacggaaggtttcaagaagacattggatcttatcggtgttggttaccgtgctcaattgaaaggcaagactttagtattgaacgttgggtattcacatccagttgaaatggaagccccagaaggtgttacagtcgaagtcccatcaaacacaaacatcatcatcagcggtattagcaaacaacaagttggccaattcgcagctgaaatccgtgatgttcgtcctccagaaccttacaaaggtaaaggtattcgttatactgatgaatatgttcgccgtaaagaaggtaaaactggtaaataaagcagcctgagctgttaaacgatattaagaggtgaaaattgtgattacaaaaccagacaagaataagacacgtcaaaaacgccatacacgcgttcgtggcaagatctctggtactgctgactgcccacgcttgaacgttttccgttctaacaaaaacatctacgctcaacttattgatgacgtagcgggtgtgacgctagcaagtgcctcaacattagataaagaagtaaaagcagaaggtactaaagtagaacaagcacaacaagttggcgcattagttgcacaacgcgctgttaaagccggccataaagttgttgtttttgatcgtggcggttacttataccacggtcgtatcgaagctttagctacagctgctcgtgaaaacggactagaattctaataaggaggaaaaccatttatgacttacattgatccaactcatttagatttagaagatcgcgttgtttcaatcaaccgtgttacaaaagttgttaaaggtggacgtcgtctacgtttcgcagcaatcgtaatcgttggtgataaagacggtcacgtaggtttcgggacaggtaaagcacaagaagttcctgaagctatccgtaaagccgttgaagacgctaaaaagaatcttatcaatgttcctaaggtcggaacaacattacctcatgaaattattggtcgcttcggcgctggtcgtgttctattaaaaccagctgttgaaggttctggtattgctgccggtggtgctgttcgtgccgtcatggaattagcaggaatcgatgatgtgacaagtaaaacattaggtagcaaaactgctatcaatgttatccgtgccacaattgacggtttaactcgtatgaagactgctgaagaaattgcagaattacgtaatgtatctgtagaaagcttacaaaactaggaggataactgaacatggctaaattaaagattactttaagaaaaagtgctgctcatcgtcttccagaacaacgtaaaatggtcaaagaatttggcttgaaccgagtaaatagttctgtaatcaaaccagatgatgctgcaactcgcggtgtgattttcaaactcgcacatttagtaacagtcgaagaaattaaagactaatttcaacatatattgcaaggaggtgcgcacaataatgaaattacatgaaatgaaacctaacgaaggtgctcgtgacgttcgtaaacgtgtcggccgtggtacttcttcaggtactggtaaaactgctggtcgtggtcaaaaaggccaaaaagctcgtagtaaagtacgtttaggatttgaaggtggacaaatgcctttattccgtcgtatgccaaaacgtggattcaagaatatcaaccgtaaggaatatgctgttgtcaacttaaacgatttaaatcgttttgaagacggtgcagaaattacttcaactgttttaatcgaagcaggcgttgttaagaatgaattatcaggtgttaaattattagcgaatggtgaattaaacaaaaaattgaacattaaggtaagcaagtattctgaagctgcaaaagctgctgtagaagctgctggcggttcaattgaggtgatttaattgctaaagacactcaaaaacgcatttaaagtaaaggaaatccgtagtaagattttgtttactttaggcgttttgatcgtttatcgtttaggtgcacaaattacggtaccaggtgtgaatgctggtgcattgactaagttgggttcaactggtttgatcccattgcttgataccgtaagtggtggtggcttggcgaactattccatcttctcgatgggggtttcaccattcatcactgcccaaattgtggttcaattactacaaatggatattgtgcctaagtttgttgaatggagcaagcaaggtgaagttgggcgacgtaagcttaaccaagtaacgcgttacttaaccatcatcttagcgtttatccaatcgatagggattaccgctggctttaactcactcagtcaaatgggcttggttaaagatccggggattaagaccttcgttagcatcgggatcattttaacgggtggtacgatgttaattacatggttgggtgaacagataacggataaaggcttagggaatggtgtgtcaatgatcatctttgcagggatcattgcacgccttccaagcggtctttaccaaatcttccgcgaacaagtcttgaacgcttcaaaaggcgatatgtggaaaggtgtcttattcatcatcggtttgattattgcagtactcgtgattgtcacatttgtgacatgggtccaacaagcaaatcgaaagattccgattcaatatacgcgtcgtgaagctggtgcaggtgaaaatagttacctaccccttaaagttaacgtcgctggtgtgattccggttatcttcgccagttcatttattatgacacctcaaacaatcttaatggccttccaatcaggtcatggtgcagatacttggtttaaagtattatcagatatcttcagcatgcagactgtgacaggttcgattgtttatacggtgctcattgttctctttaccttcttctatgcttttgttcaggttaaccctgaaaaagttgcggagaacttgactaagcaagggagttatatcccaggtgtttggccaggtaaaggtaccgagaagtatctttctagcgtattaatgcgtctttcaactgtcggtgcgttgttccttggggtaattgcattattaccacaattagcagcaaacctcggtggcttaccccaatcaattggtttgggtgggacgagtttactaatcgttgttggtgttgcgcttgaaagcacacgtcaactcgaagggttacttatgaaacgcaagtatgttggattcattcgataagcaattatcgtttaaaaagtattgaatcctggttttaaataggaggcaaaggcatgaatctcatgttaatgggacttcccggcgctggtaagggaacgcaagctgaaaagattgttgacgcttatcatattccacacatttcaactggtgacatgttcagagctgctatggcagatcaaacagaacttggggttaaagctaagtcattcatcgataaaggtgaattggtaccagatgatgtgaccaacggaattgttgaggaacgtcttgcacaagcagatactaatgtaggttatctccttgatggttttcctcggactcttgatcaggcggatgctttagctgccattactgataaattgaacaaacctttagatggtgtgattaacattgatgttgatcctgaaatcttggctgatcgtttatctggccgctttatttgtaaaaattgtggtgcaacgtaccacaaactttaccatccaactaaagtggaaggtacatgtgatcgttgcggcgaacatgttttcttccaacgagaagacgacaaacctgaaacggttaagaatcgcttaaaggtcaatatcgaaatgaatacacctttacttgattattatgaaaaacgtaacctactttacacggtggatgggaatcaagaaattgatgatgtgttctctgccgttcaaaaagtacttgataccattaaagactagtcatcaactcaagtgatctcacggtcattgttcacgtaaaagcctgactagttgtttaatgacagaattctcagtgcttttaaaaatttaatacttgtgatataatatctcggtatgaccactagcggtgagtgcggagagctctcaccatttttctgtatgaattttcacaaccacaagggggtacttttgcgtggcaaaagatgacgtcattgaaattgaaggtaaagtaactgatactttaccaaatgcaatgtttaaagtagaacttgaaaatggtgcagttattctggcacacgtttctggtaaaatccgtaagaactacatcaagattttacctggagaccgtgtgacagttgaattgtcaccctatgatttgactaagggacgaattacgtatcgctttaaataggcgtaaggatcatatcaaggaggtcagtcgatatgaaagtaagaccatcagtaaaaccaatgtgcgaacattgtaaagttatcaaacgaaaaggccgcgttatgattatctgcgcagctaacccaaaacataaacaacgtcaaggttaatattaattaagcaggaggtgcaagaatggcacgtatcgcaggtgtggatttaccacgtgataaacaaattgtgattgctttaacttatattttcggtatcggaaatacaactgccgttaaagtcttggctgatgctggcgtcgcagaagacgtccgtactcgtgatttaacgccggatcaagaagacaagatccgtgcagcaatcgacaaagttaaagttgaaggcgatcttcgtcgtgaagttagcttaaacatcaaacgtctacaagaaatcggttcttatcgtggcatgcgtcatcgtcgtggattaccagttcgtggtcaaaacacgaagaacaacgcacgtactcgtaaaggtaagaaagttacgattgcaggcaagaagaaataatcagtaaaaggaggttataatttatggcaaacaagaaaaatgctccacgtaagcgtcgtgtgaagaaaaatatcgaagccggcgttgcacatattcactcaacatttaacaatactcttgtgatgatcactgatcctcatgggaatgctgttgcatggtcatctgctggttcattaggtttcaaaggtagtcgtaagtcaacaccttttgctgctcaaatggctgcagaagctgctggtaaagaagccatggaacatggtatgaaatctgttgaagttgctgttaaaggaccaggttctggccgtgaagctgcaattcgctcattacaagcaactggtttagaagttactgctattcgtgacgttacaccagttcctcataatggatctcgtcctccaaaacgccgtcgtgtttagtctgggctacgcttcattttgagacaaactgaaacgtgttcacgtataaacacttctcgttttgaaaggggtaaaagataagaatgatcgaatttgaaaaaccaaacattacaaaggttgatgaaagtactaactacggtaagttcgttgtagaaccacttgaacgtggctatggtacgactttaggtaactctttacgtcgtattttactcgcttctttaccaggtactgctgtcacagatattcaaattgatggtgttttacatgaattttcaacaattgatggcgtcctagaagacgtaacacaaatcatcttgaatattaaaaaattagcacttaaattgcatgttgaagaagacaagacaattgaaatcgatgttaagggtccggcaacagttactgctgctgatatcatttctgatgatgacgttgaagtcttaaatactgatcaatatatttgtacagtagctgaaggcggcaatttccacgtgcgaatgacagttaaaaaaggccgtggttatgttgctgctgatcaaaacaagtcagacgatatgccaattggtgttttgccaatcgactcaatttataccccaatcagtcgtgtcaactatcaagtagaaagtacacgtgttggtcgtcgtaacgatttcgacaagttaacacttgatgtttggacaaacggttccatcagtcctagagaagctattagcttagctgcgaagattatgacagagcatttggcaatctttgtagatcttactgatgaagcgaaaaatgctgaaatcatggtcgaaaaagaagagacacataaagagaaaatgcttgaaatgacaattgaagagttagatttatcagttcgttcatacaactgtttgaaacgcgctggaatcaacactgttcaagagttaactgacaaatcagaagcagatatgatgaaagttagaaatcttggtcgcaagtcgttagaagaagttaagaacaagttatttgatcttggcttaggcttacgcacagaagaataaactgataagaaggagggactccattcatgagttatcgtaaattaggtcgcacaagctcacaacgtaaggcaatgttacgtgatttgacaactgatttaatcatcaatgaacgtatcattactacagaagctcgtgccaaagaaattcgtaaaacaactgaaaaaatgatcactttaggtaaacgcggtgatttacacgctcgtcgtcaagctgcagcattcgttcgtaacgaagtagctgatattcgcgaagaagacgatgctgtaatcgttcaatctgctttacaaaaattatttagtgacattgctccacgttatgctgaaagaaatggtggttacacacgtattcttaaaacagcccctcgtcgtggtgacggtgcattaatggtgattattgaacttgtttaatcacaaaatgatttaggtcatttgatcgatgagacagggcgttatgatgatggaagtactccgagtctagtcctaaggtcatactagcaacacagtatggctttcatcgattgatgatttacataaaataacgtctaattccgagttaaatcggagttagacgttttttgtgttggatatcctttgaataaagggtgactaacgaaagcgctatggccttttatatgataaaataggaacaggtttttgatttgaaacgtgcatggataacataaccaatgcactttaattccaaggaaaatacgggttattaatcatgaatgagcaaaaaataattcaagttgaacatttaaaatatgaatacccacaatctgaaggacatttagcactgaatgatctttctgtcagtatcaatgccggcgaatgggtcgccattatcggtcataacggtagtggtaagagtaccttcgcgaaatcattgaacggtttgttagatttacaatcgggatcagtgacgattgatgggttaccattgtcgttggataacgtgtggactattcgccagaaaattggcatggtttttcagaatccggataatcaatttgtcggtgtaacggttgaagacgatgttgcttttggtctcgaaaatcaggggattccgcgagctgaaatgattgaacgggttaaagacgcggttgaacgtgttggtatgagtgaatacttgaaacgtgaaccaagccgtttgtcgggtggccaaaaacaacgagtggccttagcagggatcatcgcacaacaacctgagattctgattctcgatgaggccaccagtatgctagatccaaaagggcgcgaagaagttctcgcaaccattcataagttaaaacaagaaacaaacatgaccgtgctatcaattacccacgatattgacgaagccgcaagtgcggaccggatcattatcttagataaggggcaagtgcatgatcagggcacaccggccgatatttttgcatatgggcaacgtttgcttgatttagggctagatgttccatatccagaaaaacttaaagcagcgctaaatgaacgcgctatcgagatgcccacagattatctcacaacggaaaggatggttgagtacttatggacattacattcaaaaatgtaagctacacttatcagccaggcacgccttttcaagggattgggctagaaaatatcaatgtgaccattccaagtggctcctatacggctttgattggtcatacaggtagtggcaagtcgacattgctccaacacctcaatgcactcttaaaaccaacgagcggcgttgttcagattggtgagcgcgaaatcacgcctgagaccaacaacaaaaacttaaaggctgttcgtcaaaaagttgggatggtttttcaatttcctgaaagccaattatttgagtcgacggtgcaaaaagatattgcttttggtccgcagaacttcggtgtccctgaagctgaagcacttgaacgcgctaaagagatgattgaactcgtcggtttacccgctaatgtgattgacaagtcaccttttgatttatctggtgggcaaatgcgccgcgttgccattgctggtgtgttggcaatgaaaccggaagtattggtcttagatgaaccaaccgcggggctcgatccagttggccggcgtgagatgatggcgctttttgaaaagttacacagtgagcaggggatgacgattgtgatggtcacccatcagatggatgatgtggcgaactacgccgacaacgttatcgttttggaacatggcaagctagctaagaccggagcaccacgcgaaatttttgcggatccggattggttaacggaaaaacaacttggcttaccaacaacgactcagttcgcgcaagctttaatgcgacaaggctttgtctttgatcaagtaccactaaccgaacatgaattggccgccttattagcggaacaactaccgaagaaggcggggattggacatgaataaattaattctgggccgatatatccccggtgattcagtgttacaccggatggatccacgggcgaagttattagccagtttttattatattgggatcatctttttagcgcgtacatggcaagcctatgttttattactggtctttacgttagcgctaatcgggatttcaaaaattaaactcgacttctttattaaaggagttaagccgctgttatggctaattctatttacagtgctcttacagattttcttcacccgtggtggtcatgtctattggcagtggggatttctgacgcttacccagtacgggctgattaatggcgtctacatcttcatgcgctttatattgattattttcatgtcgactctcctgacattgacgacgccgccattgtcgttagcggatgcgattgaatcaattctcaagccgcttaaagtagtccattttccagtgtatgaagttgcattgatgctatcaattgcattgcgctttgtaccaacattgatggatgaaaccactaagattatggatgcgcaacgtgcgcgtggggttgattttggtgaagggaatttattccaacaaatgaaagcaatcgtgccgattttaattccgttatttgtcagcagttttaaccgcgcggatgatttagcaacggcaatggaagcacgggggtaccaaggtggcgaaggccgcagtaagtaccgaattttgaaatggcggacaagagacaccgtggcatttatcacgatgggccttttaaccgtcgcacttttattcttaagataacgcaaaaaggactcagttaaaccaacggaggttgatttagctgagtcctttttttttgcacttttttgattagcttgttttttgaaccgacgtttcaacgttgaagcactaatgccagtttggtaactaatttgagcgtacgtaaagccctcttcacgcatgtctagggctgcttgtatgttcatcatcagtataggtcgttttacgaccttcagtgtaactagggttggtgacacgagcattatgtttcccttcctgggtacgagtgagaatcatatcgcgctcaaattgcgcaaaagcactaaataaggtaaaaatgagtcgtccggaaggggtgtcttcaatgatgcccatgttcaaaatatgaattttaatgcgggctttaaaaagttcttggatgatttcaagtgcttctttggtatttcttgcgaagcgatcaagttttgtaacaacgatggtatcaccacttgaaacccgatctaatagttcattaaattagggcgatcaacggtagttccggtaaacttttcgctgtagataatgtcacagctttcttcctttaattgactaatctgggttgctagactttgtccggcagatgaaacgcgtgcgtatccgaacttcattgcacaattctccttatttctacttataataataattatacagcatttgaacttgttttatattaaaaatgcatttttaaatcaaattttttacgaacattcataaaaagattgctacttttcagaaaattatttagaatagaactactaactttttaacacaagagggataaaatgacacaacggtatcgcgtaacaattgcctatgatggaacggattttgcgggtttccaagtgcaaccgaaccaacgaacagtacagggcacattagaaaaagcactgacaaagatgagtaagggtgcttatattcaagtgtatggttcagggcggacggacgcaggtgtccatgcaacggggcaggtggtccatttcgactatccaggtcaattacccgctattagtatgttacgggccttaaatagcctcttaccgcttgatatggaggttgtggatagtcagttagcggatgatgactttcatgcacgattttcaacggtcggtaaacggtatatgtatcgggtcgatcttgggcattatacgaatccattcaagcgacgttataccggtcattatccgtatccaatcgatgtggaacggattcaagcggcgctgccagatgtgatgggcacgcatgattatacgagttttgcggcttcaggtggggtcattaaggataaggtgcggacgatttatgatgcgaccgttgttttcaatgaacccgaaaatgaactcgtttttgagttttatgggaacggctttttgtataacatggtgcggatcttggtcggaactttattagaaattggtaacggtcggcgggatgtccacgattttttacggctgtatgaagttaaggaccgtcaacaagctcgctcaaccgcgccagcaagcggtttgtaccttaaaaaagtttattacgaaactgatgaaaataattgagattcaattgacttaatcgtgaaattacgatactatagtatctggtattgtttgccccacgataggccccggaaacttattgagtgtcaaacaaacacagaatattggaggaataaatcgtgcgtacaacttacatggctaaaccaggcgaagtagaacgtaaatggtatgtgatcgatgcaactgatattgcattaggtcgtctatcaactgtagtcgcttctatcttacgcggtaaaaataaaccaacatttacacctaacgttgatacaggtgataacatcatcgtcatcaacgctgaaaaaattaaattaacaggtcgcaaagcaaccgacaagttatatcatcaccatagtaaccatcctggtggtttgaaaactcggactgctggcgaaattcgtgaaaacaacccagaacgtttaattgaaatgtcagttaaagggatgttacctaagaactcattaggtcacaaccaattcttgaagttacacgtatacgctggtggcgaacacaaacaccaagcacaaaatccagaagtcttagacattacggacattatttaaggaggaaactatagtggctcaagtaacttataacggtacaggccgtcgtaaaaactcagtagctcgtgtacgtttagtaccaggtactggtaaaatcactatcaacaacaaagacgttgttgattacattccatttgctaacttgattttagatatgaaacaacctttaacaattactgaaacaacagatagctatgatatcttggtaaacgttaatggtggtggattctcaggccaagctggtgcaatccgtcacggtatttcacgtgccctattgacagttgaccctgacttccgtccagctcttaagagcgctggcatgttaacacgtgaccctcgtatgaaggaacgtaagaaaccaggtcttaagaaagctcgtaaagcttcacaattcagtaaacgttaatatcacttttatatcaatgtttacaagtacctcgcaattttatattgcggggtgtttttttgtttttgacaccatcagactttttaagtgtaagcctaatgcgccatcccagcctattcccaatatttttgctatgcttagagtaattgaaggaggcttttttatgtatcgttatgccgttatttataatccccactctgggcacaacaatggtgagtcggttggtcagaaaattgagcaggcactcatcaagaatcaacacaaggtcgaactgatgccgacggaagggccgaaagatgcaacgcggttagctaaaaaagcggcgcgggcaggctttgatgtggtggtcgctgtcggcggggatgggaccattaatgaagtcgttagtggtcttgcgacgttagatcagccgccttatttaggcattgtacctgctgggaccgtgaataatttggcgcggatgttacaaatcccgttggacattgatcaagcgattgaaaatctgcagcaggttcatctgcgcccactcgacgtcggccaagtgaacgatgattacttgattagtacaatgacattgggcattttggcggacgccgcgttgaacgtgactcagagtgaaaaacaaaaatgggggccgctagcttttttaagcaaaggcatccatgcattagcggagcatcagcattatccgctaacgattgaaacgcctgatcggcactggcaaaaagacacgcaattcttgctggtgaccctcacgaattccgttggtggatttaccaacttcaatcccgaagcgcaacccgatgatggttatttccatgtcttcgttgcgccgaaaatgtcgctagcacggtcagtgatgtttctcccttatttcttaacgggtaattttaagaagattcccgggatgacttactttaaagcgaatgaaatcagcatcacagtcgacaatcagcaaagtgcacaaacccgcattgatggtgatccgagtgccaagtcaccattggagatgcgactcttagaacataagttgcaagtgattacgcctaatccggatttataagaccaggggaggttaagatcatcggtaaaacaaaaaagaattcaaaattttctaacgaaaattctgaattcttttttttaattattgcgttaattcagcttgtttggccgcaacgcgttcactaatcttcaggaatggccagtagattagaacgccgaggattaaagtgaagccttgaatcacaggggcgcgccaatcgccgccggttgctaaataggagttgagtaatggtggtgtggtccaaggtaccatgacgactactcgattcatccagccaattgcggtgaagaagtaggcaatactgatgccaagtcctggcattaggacaaatggaatgatgagcgcaaagttgaagacaattggataaccgaaaaataacaggttcgttaatgttaaataaacttgggacgaatgatagctttgtaatatcacgactagcgcgtgattttgagaagagcaaggtcgcaatcaataaacaaatagtactaccggtaccaccaagcatcccaaatgtatcgcggaaaacgttgttgatgatataagggatgtgttgaccagctgcgtaagctgccatatttttgttcatgttgatcagtaagactggatccaataaagtaccgttaatgacagcttgatggatcccaaatgagaagaggagattaccagtcccgtaaatcaaaaggagacccggtaaacttgtattaacgcgccgaagtggttcttgaatcacatttgtaattaaagtgatgagatcagtgtggaaaccagccgttaaaatcgcagcaagtgccgcaaaaagactcactgtaatgagggctggaatcattgtgttgaaggaaccagcaacagctgatgggacggcatcactcaagttaatctgtaattttttaagctttgaaagagtcataaagagttctgttgcgactaaaccaataataatgccggcaaacattccggttgttcccacgttttggaaagttaagacgccagaaacttcgacggcttttttggcagctagtggtgtgaccggaacagtattaggcatcatgatgattaaagtccctagtgccatgacagccgcggaaattttgttgacgtaattcttattacgcgctaaacagtagccgattgtaggtgcgagtaatagcccagcaacgttcaaagtcccattggtaatgtaagtgccgaagtattgaaagttggttagcatttggccgtggaggacccaagggaatacaacgttattcacgagcaccccaattccggcgaggatgaatagtggcataataatcgcgaaggcatcacgtaatgaacgcaaatgcacttgattcccgattttaaaggcgatatttgtaaactgatcaataaatctttgtcgccgacttccttgtttaagcatagaaaacactccttttaacgcactttttttagtctaattgttcaccgttagattgaatgactttttgcagccaataaaaactagccttcggaattctagcaaggtctttgaggtcgtgattggttcgattgacataaacgacgccatagcgtttattcatatcaccttttgaacttgggatgtcgattaacccccaaccaagatagcccacaacgtgagcgccgtcttcatcaactgcgtctttcaaagcctggatatggtcgcggtgataggcaatccgttcgtcatcttgaatcatttcatgattcagcgattcttcgcgaatgccaatcccgttttcgatggggaagatggggaggccagtttcattcgaaagttttgttaagacgtttctaaaaccgagggcatcaatctgccagccccattcgctactttctaaataaggattagggacactcgcatcgcgcatgtaataattgggtggtgtgttgggtgttaattttgtgtgatcgagtgcgacagtgtagtagtaactgaacgctaagaagtcgttgtgatgacttgcaatgagcgctaaatcaccaggctgaatactgctcattaagtcatgattttgcatatattgcagtacttcggctgaatagtgaccttttgtaaaggcgtcaacgaaatgttggttgataaattctgatgcttttctagcagcaaagatatcttggggatgactggttgcaggatagaattcttgataggctaacatcccaccaatttggtcattagggtagtgggcgtgtaagtaattggcgatttcagcatgcgcaaccattgtattattagcgatcgtataaagggttaataagtcgcgctctccgttgataaagccagtattatcaaagccaggttcaaagaaaaaaccattttgttcattaaagcttagccaatatttgacttgtccaccataacggtcaatgacagccttagcgaacttagtgaatacttgtgtgacataccgacttgagaaaccattatatttttcagcaagatgcaaaggcatgtcaaaatggtacaggcaaatcatcggttcgatgcccgctttgagcaaagctgatatcaatcgatcataataatcgaatcccgctaaattaatttcaccatcaccatttgggaaaatgcgcgtccatgaaatttggaaacgatagcagttcatacccatctgttgcattaaatcgatatcttcttgataacggtggaattcatcaattcccactttccaatccgataaatcagctgtctcaggtttcacatcgtacactgataaacctttaccatcagcatcccaggcaccttcactttgcatacttgatacagaattaccccataaaaaatgtttgtctaacgtcatcatggtacctccatcacttgaatgattttatgatagcgcttttaatgtaacttgtaaagtcatattttataatttgaacaacgaatattccgaatctgaatatgctataataaccatatcaaatggtaggtggttactatggcaaagtataaggatattgcgacaacgattcgcacccgaattttagaaggacaatattcagctgatggtccgcttcctgaacagaagaagttagcccaagaattcgaaacatcgagaatgaccattcaaaaagcactcgaaatgctaacttatgaagggctcatttatagtgaacaagggcgcggtacgtttatcaaatcaaacgtctccgcgctatcacaattagatgcgactgtgaatcaatatgtagggacgactaagctgtttgccggaaaggccacagtaaagagtgacattctaaagaatgaattgcgattaccggatgcagaagaacaagaaaagcttcagttagctaaaacagaagcggtctatgacgttgttcgactccggtttttaaacgaagtaccctatagtattgagcattcgatcatgccggctaagattttaggggaattaacagacgcagtacttaagaagtcgatctacgaatacttggaacaaacattgcatctaaagattggcgtggcttaccggcgaattagtgccgatcaaccgaatcaaatggatcaagaatacctgcactgcaaaccagtcgaacctgtcttacaagttacccagacagtctttctacaaaacgggctgccttttgaatactcaaccacacgacatcgatatgatatggggagtattacaaccattacacaagggaatcattaataaaatgacctcactcagttaatgagtgaggctttttttgttgcattgatttgaagttgttgacaaaaattcacatcaatggtttaatggtttaaacttatgaaccattaaaataaaaccggagattaatgtatggatgaaatgaaggttattaaacagagctttgctgagctgagcccgtttttgacggcgcttggggatgagaagcggcagagtattattttagaattgatggctgataaagcttgtgatggcttacaggtcacggatttaatggcggcgtcggacttgtcgcgcccggcagtgtcgcatcatttgaaagtgttgaaggaagccaacttggtcgactttagacgcgaaggcacgaagaactattattacttgcaacacgaactgggcgaaatcaatcaactaaaaacactgctggatcagattacggcagtcatcgaaaaacaacagtaaaaggagtttttaaaatgcaaaccatcttaggtagtagcggtcagattggccaagagttagccaaggcacttcataaggacttcacaacggacattcgactggtcagtcggaatccaaaaaaagtgaacgcgaacgatcaactatttccagcaaacttgctcgacgccgcccaaactgatcgtgcggttgcaggcagtgaaattgtttattttaccgctggcttaccgatgaattcagacatgtgggaagcacaatttcacattatgatgactaacgtgattaacgcgtgcgtcgcgcacaaggccaagctcgtctttttcgataatacctatatgtatgcgaaaaatagcacgctccagacagaagcgagtccttttgaacccgttggccgcaaagcggttgtccgagcggagatcgcacagttgttacttgataagatggcaactggcgcaattgaagcggtcatttgtcgtgcatctgaattttatggcccaggcaagacgcaaagcattacgaacacaatggtctttaacaatatcaaggcgggcaaaaaggtgcgcgtgccattgaatgatcaagcggttcggacattaatttggacgccagatgctagtcgtgcgatggcgttgattggcaatacgctggatgcgtttggtcaaacgtggcacctcccttgtgatgacggtaaaacatacgccgaaatcatcgcgctagcaggcaccttaacgcatcaaccaatcgactacaccgttttaaaaatgtggcagttcaacatcggtagctggttcagcaaaccgctaaaggaattaaaagaactcctacctagatatgaagaagataacctgttcagttcagacaagtttaagaaacggttcccagaatttaaggtgacgacgattgaagaaggggttcaggagattctttaaaaagtcagcctttcgctcgatagactaactgttgttcaatattatataatcgctttaaagtagcgatgttagtcaatcagataaggagcgtggcatgatgaagaaaccttttaataagcaacaagtgaatggtgaaccaaatccggaatttgattccttctttgcggaagtcttaaagaagttgccgcaacaatcggcagctgtgattgcgaagtcttttaaccaatccaaagcattggcggaaaagacgatggcgaagagtcggacacagtttgatggggtctttgaagacttcctagtcggtgtggatgatcagatgcgtaaaaaggcacacaatatcattcacgcagcatcactaacagcagcgattattggctgttcaccaattccattttccgatgcgttcttgttggtgccggttcaattaacgatgatggcgcgtttgcataaactattcggtcaatcttggtcggctagtttgggcaagagcctgtcgaaagaattggtactcgttggcctaggtcggagtgcagtcggtaacattctaaaactgataccggtcgttggaacggtcaccggagccgcggtcaatgcgaccgttgcgatgtcgattaccgaagcgctcggctggttaacggtcaagatgttgaacgacggcgaagacatcttcaatgatgttgtttcatttaaaaatcaattcagaacgctatttggattgttacgacgtaagtagttatttttcaattgacagaataagaacaaaacgatttaataaacccacatcactaatttttagggaggctaaccagatgcccaaagtactaattgtccatacgaatgttacgcgttatcaaggaaccaccgatccaaccggattatggctgggggaatccgcagagttcgttgatgaactgcaaaaagcggggattgattacgattttgtcagtcctaaaggcggctttgtcccgcttgatccacgggggatgaagtacacggatgaatcaattctgaccatctatgaacaaccggattacgtgcaacgggggttagtcgcaacgctcaagccaagcgatatcaatccagctgattacgctgcgatttactatacgggcggccatggcgtgatgtgggattttcctgataatccagaattacaagcaattgcccgggaaatttataatcacagtggctatcttgcgtccgtttgtcacgggatcgcgggtttactacgcattaaaaatgatgacggtcagtatctgattgctggtaaaaaagtgactgggtttaccactgcagaagaaattattgcgggcaagaaaaaagtggtgccatttttaaaccaagaagtggcaactcaaaacggcgcgcaatttgtgcaaaaacggttttacaaaccatttactgtccaggatggtcagttgattacggggcaaaacccgttttctgtacgagaagtgacggagcgcttgattccggccctacaaaataacggttaggcattctttgaattctatgctaatcttatagaatgtagaaaagttaggagtcagaagatgagtgaaaaacaaacaccaaaattaacgcaaaaagaaaaaatgcaagcactaattgatcagaaaaaaggtggcggcagatcaaaacagaccgacgttgctaaaaatgatcggacaaagatgcgcaaagggccaaagatttttaacgaaatccactggtaaagagtgcgtttggttgcggttagcaactgagcattaagacaaaatccgcagtaatccaggttttaggagtactgcggattttagcttaagcggaagttgttgcaaccaaaaagcacgtttcaaacaaagtgcgtttgaaacggtttggttctgagcattaacctaaaaataagcactatggcggtccttgccatagtgcttattttgtagttaagcacaggagccagtttcaaaaagcacgtttttgggctagggcaattttgcgctagccctttttgtgttaacgcgctatgctagaagcaacttattttaaatcgaatggagtctttgtatgtcatctttaatcgaacaaatgcaacaccatgtttcagttcgtgatttcgagccaacacccctcagcacgacagtgaaacaacaactcattgcggcagctcaaagtgggtcttcttcgaatttcgttcaggcattttcaatcattgaagtgaccgatcccgtaattcgtgatgaaatcgcaacgatttctcaaagtgcggcgtacgttaaacagacggggacgttctatgttttcgtcgcggacttataccgacaagccacactcttagaaaaagcgggccagtcattagctggcatacaaaatatggaagccttattagtcgcaacgatcgacacagccattgcagcagaggatatggcagtcgctgccgaatcgttagatttaggcatctgttatatcggtgggattcgcaatgacattgcgcgtgtcgctgaactactcgggttgcccgcctataccgtcccactatttgggttaacggtcgggattccgaagactaaaaatcaggttaaaccacgattaccgcaagttaatcaagtcgctcaaaatcaatatgatgtgcatcaggcaaccaatttagtgcaatacgatcaacaaatgcaaaattattatgctaatcgtgggaccaatcagcaacaaactgattggtcgaccaagaatacggccttctttagtgaagtgcgacgaccagcagtggcgatttttttgaaaaaacagggctttacgttgaattaagaaaaaatggtacttatcttaaaggacaatcagttttctgattgtcttttttttgtgtcgtgcaagctcggatatgcgataataaaactagtcaaatgtaaccggttaaataggtataggagtgatcgttatgagtttaattgatgtacgacatgtagccaagcggtatcagatgggcgagacaacaatcgtggccaatcatgatattagttttacagtcaatgaaggggagttagcggtgattctcggaccgagtggtgcgggaaaatcgacagtgctgaacatcttaggtgggatggatacacccgatgaagggcaagtgttgattgatggtgtcgatattgcgcagtttagtgcgcgccaattgacggcgtttcgccggactgatgtcgggtttgtgttccaattttacaatttagtgccgaatttaacgacgcaagaaaatgtggcgctggcaacggctgtctcgccgaatgctttagatgttgcgcttgttttgcaacaagttggtctacaggatcggcttcagaattttccggcccaactatccggtggggagcaacaacgggtggcgattgcgcgggcgcttgctaagaatccgaagctcctcttgtgtgatgaaccaactggcgcactcgattatgaaacgggcaagcagattcttaaattattacaagaagttagtcggcaacaacaccggaccgttgttttgattacgcataatgccgcgattgctcagatggctgatcgcgtgattcacattaacgatgcgcgcgtgcgttcaattgaagtgaacactaatcccttgccagttgaaaagattgaatggtaggtggttaatatgcagacacgtttatatttacaaaccacattccgcgatattcggcaggcgattggacggttcattgcgattatcctgattattttaatgggtgtcttactgtttgtggggattaaatcgattggcccgaacttagaagagactgtggatcattttgtcaccacgcaacgcgtatccgatttacagattagtgggaccgctggcttaacggaacaggaccgtgcggtggtcgaaaaaatgcatggtgtccaagctgaattgggttatcggattccgtatcgcgatgaagcgcgggatgttaacttacaattatataattaccaaccaactgcacggcaaaatcgcttaacgctgactaccgggcgctatccgcaacgaacgaatgaaattttagtggataacgcggtcaagacgcattatcgtctggggcagagggtgacggttaagagtcagcagctattgacgcaccggtttaaagtggtcggttatgtggactcaccgctatatatcgaccgtcaggaacgtggaaccgtaccggtcggggatggtcagctagatggctttatgtatttgccacaaaaggcatttgcacctcaaccgtattcggtgatgatggtgcgctttagtgatttggatcgtcacagtagctttttacaggcttatcgcaccggcattgcgactaaagaaacacagctcatgcgccaattaaaagcacacacaactcagccgcagcaacagtacttattaactgcgcgcagtgctaatccgggttttaatgaatttacgagcttgtcggatcgcatcgatgcgatagggaatgtctttccggtcttctttttcttaatcgggattctaattacctttacaaccattacgcggatgatcgaagaaaatcgtaaggaaatcgggacattgaaggcactaggctatcgtaattgggaaattgcgcagaagtatttactatatgcgctactaacaggtagtatcggcaccgtgcttggcaccattttgggcacgaagttattaccgctagtcgtctatcgaatccaaaaaccggtctacacctttgcgcattatccaacccatttttggacagttccaattttattagccactggagcggtcttgattgcgacagttggggccacggggtatgttttaatccgcgatttacgcgagaagcccacccaattactccgaccaaaagcgccgaaaccaggccaacggatttggttagaaagaatcacaccgctctggcggcgattgagtttccatcaaaaagtaacttatcgtaatctttttcgctataaagcacggatgattctgaccatcttaggcatcgctgggtgtaccggtttaatggttgcaggctttggtttaaagacgtcaattggcgaagttgctgaccgtcagtttaagcaattgacccattaccaagcaattgtgacgcttaaaataccgaatagtacagcccaaacgaagtcgattttaacacagactgagaaggttcggtcttacttaccggtcacaatgacccaggttaagttcaagcaaaaagggattacggatcaagcggcgacagtctgtgcggtcgctgatcaagcaaaacttgcacagtacgtcgctttgcaaacaccgcgagaacaacaacgactcacattgccgaaacacggtgcgattattgctgcgaacctcgctaaaacatatgctgttcaaaaaggcgattggttaacgctacaaacggcacaaggtcagcgtgcacgaattcaggttgcgggtatcagtgaaaactaccttggtaacagcgtctatctccgccaatctgctctttcaaaaacgctacaacaaccagttgcggctaatgcctatctcgtgcgcaccgctaagatgactaccaagcaagaaaaacagttggcgacccgtttgcaacaaacaacggaagtggcggccacaacgtttatcagtgatcaaggggctaagcaagcaacggctagtgctaatttagacccaatcgtttttattttcatcgggttatcagcggttttagcgtttgtcgtcttattcaaccttactagcatcaacgtttcagagcgggaacgtgaattggcaacgattaaagtcctgggctttttcgacaaagaagtgacggcctatattgtgcgagaaaatgtaatcttcaccgttattgggattgtgcttggctttggaatcggtaaattgctgacttggttcatcatcacgatggcctcgtcagaacaagtggcctttccactcatcattccagctagcggctacctgattgcggcagggatgacggtgctattttcactgattgtgatggggatgacccatcgcaagttaaaagggattgatatgattggtgcattaaaggagaacgaataaaagttttagcaaataatgcttttttacttgcttgtgacgttacgtcatcggctagtatcaaggtatggaggtgatattctatggcgcaatatacaacaggtgaactcgctaaattatgtgatgtttcggtgcggacggtgcaatattacgatcaggccgatttgttgaagccggcaagcttaactgaaaatggacgacggctgtatggggatgcgcaagtgcagacgttaaaagtcattctaggctacaagcagctgggcttttcactgaaggcaattcaaaaagtgatggcgagtcaagcttcgacggatacactgacattgctagtcgaacagcaactcaatcagttagtccaaaaagaaacagacttagctaaccagaaagtggcgttgcagtttgtactgcaatcgattcaaaatactagcgcggtgccttttgaaatgacaatcagcgacatagaagacgcaatggctaaaacaacacagttaaaaagattacatcggcgaatgctgatgtggggcttattgattgatggtgtggaaattggcttattaattcttgggtttctaagtggaatttggtggccaatgtggattgggataccggtcatcattgcgatggccatttatgtgacaacattctactatcaagaaactgtctatctatgtcccaattgcaagacggtcttcaaaccacgcctaagtaaaatgttctttgcccggcacacgccaaagacaagacaactagtgtgtccaagctgtggacaaaaaaattactgcatagaacagagtgcgtaagcaggcgttcgtatttttaggattaactggatttgccgaattggcgacgcaatcgctaatttggcaaatttggttagccacagaaatatgcctgctgaagcacgtttaagaacagagtgcgtttggtcgcggttagcaaatgagcattaagacaaaatcaccagtaatccgtttttggagttactggtgattttagcttaagcggaagttgttgcgaccaaaaagcacgtttgaaccaggtgtgcgcatcaaacccaaaaccatctaagctgggacgatttcgtctcagtttttttgagtcagatactttataatagaagtattacaaaaataaggaatgatgcaaatggaaacgacagtgatcatctcgacgctctttcggttggcaaaagtcttcgatgacatgggtaagttattgttcaaagcgcatttagatgtgccgttgacgtttgaccgtgcgcaatcgcaggccttattacggcgcaataaccgactagaattcagctatcaacaacttaaaacaagtaaaataaaactattaaatcaattattggcgacggcgggagccgatccctatttgtgggccaagttacggcgactgcaggcattggatgtggcgagtttggcagccgttcaagcaaatccgcaatttaaccgccaacgcaagattaatcgtttgaaacaactgattatcaatttacaaaatgaaaaaatcaatgagagtacggtactgacgaagcaggcgctcgcctatttataccatatagcccctgataaagtggcggccacgagtaagccaggaccgatactggccgatccatttgatagccgcgcttttaaaatggacatgatggctcttaattatttagatcagtattttaacgtgcaggaattgcaatattacgtgaagtacctcgtgtttattcacgcgcatcaagcggcggaagcggtgattcactatgatgcgcgaacggttttgccgaatgcggaacaaactggtttttcggcagttgcctattacgtcacgcttaatcgccaatcgtatacctacatttcctacaaggggactgaggggacgatggatgatccgcggattaagtcgtttacgcagcggctggataattatgtccgtgagagttatcaagattggaagtataatattgatgcgatgctgattggcaataccgaaaatgatgagcaactccaactcgcacggcggtttacgcggtatgtggtccggcgggtgcgccgaattaatccggcaacaatcatctatggactgggtcactcactcggggggcattttgtgcagacggtccaattattggatgaaccgtttgatggtggctataccttgaatgctgccccggttcagttaaaacaaataaagcattatcggccggatcttttatccgcttcaaaatggcaacaattattcgcattgactaagcacaacaatacgcaagatccagctgtagcgatgcaagtccacgcgattttggggcacaattacgctacaattgaaaatgaatggttcattaaagatttaacgcggatctattttggctttccgtatacgttctacattgggacggtgcgctatttgaatgctaaaaattggcattacccgtttgtgactgacgtagcaccatatctccgaaaagatgagattcaggcgtatagccagttctggggtaatctaattcgctatttgaaacgtgttgagactagaaatgggtcgttgatgttggcaagtctgatgacatatggactgcagacactccgtgaagtgtatgccgcgattaaaacggaacaggcccaacagatttttgcggcatatgcgcgctatttatacgatgcgcatatttttaaagacacccccgttcaggtacaggccaattttgaacgggaattatcacggccgcgcacggcactccgtgtgttacaaggcgaatggccatttttaaaaagcgtcaacaatgagatggtcgaaacggtgattttcttccacacgattgaaggcgctcaatactttacacgctagacagatgggatgttaactaatggatatttatttgaaacaagcaattttacaagtggtcgaccgcgaactcggcgatccaatttactcacaacaggtgctagatctcaccaatgggaacacacgcgactatttaaccaacaagattaagaaattatcgtctgcccagagtaagaccggcgtgctacgccaagatgctgagctcgcatcttttctgcgcgatgcgacagctgattttatcggcgctagccaacgcctcgttgaaaaatggtacacggtctatcagaaaagtgacgatgcaccgagtgcggatgcgtttgttgtcttgtatgaacaagatgcccaagcttacttggcttttttgaaggtcgattatcatcaagccttcacccattatgtcaatgctgaagaggggccattgatgaatcaactgatcattcaccaatcgattctatcgaataagacccaaaaggcggatgaggggttcgcgattaacctccagacgtttggcttcgaattgatggagaagaagtacaccttctccggtgaaaagatgacctatttatcaacgaacgtgattgaaagcgaaccagcgccatcgctagaagaaaacgtcaaggtcgttaaaaaggccgctgaaaaaatcggcaagaagttcgaagttgccaaacacgatgtggtcgccaacgtcaaagaagccatctacgatacaatcgaaaccaatggtgaaatcgacacgagccagatggcagcgaagatttttaaagacaacgtttcagcccaaagtgagtttaaagcagaaatgacggaaaacgcgccagcagcaccagcgccaatctcaccagccgtccgcgaaatcgccgaaaagaaatacggcaaacaaaaactcaaactctcaaacggcatcgaactaatcgtcccaatcgacgtttaccaaaacccaaatctatttgaattcatcaaccacccagacggcacaatgtcggtggagattaagaatgtagaagaagtgattagtagattatagagtgcgtaggcaagcggttatattttgagcattaactggatttgcccaattggcgatgtaatcgccgattgggtgaatttggttaagtacagaaatatgcttgccgaagcacgtttagagtgcgtttgaagcgggtcgactttgaggattaacctaaaaatgtgacttatgacgggtttggtcataagtcacattttgtagttaaccggaaaagccagtttcgaaaagcacaccaaaaaagagcatttctctcatcctatcgagaaaaacgctcttttactatgcctttctttttgcccagattaaacggataatcttatcgaattccgtgatgattagaatcaagaagcctgcgccgatcgaaacgccccattctaataaggtaagcggttcggtgtagaaggtttgttgcatgaatggcacgtaggtcaggatcaattggagaataatcatcagggcgataatgccgaatgccttttggttggtgaagaaagcttttgaaaaggcgagtttcgcagtccgaatattgaacaagtagaaaatcttgctgatgacaatgatattgaccatcattgtgctggctgtgacttgatcgacaccgcggccgagtaaccaatcgtaggctaacaagccgattaaggccatcaagacggaaacatatgccatttggaaaacatcgtgtttattcatcagcgcttggccggtcttacgtggcttgcgggtcattaagccatcttcagctggttcgaagatgaaggcgaattgaatcgtaatcgccgagaccatgttaatccagagtaactgcgtcgcttgcaacggcatatcttgttgcatcaaaatcgtgaaggcgatgattaagccttccgcgaaggaagtcgggagtaagaagagaatactctttttgatgttatcgtaaatccggcggccttcacgaattgcgacggacattgttgcgaagttatcgttggttaaaatcatatccgcggaatctttggcaacatcggttcctttaattcccatggcaaccccgatgtcagcgcgcttcaatgcgggcgcatcattgacaccgtcaccggtcattgcggtgactttgcgactggcttgtaaggcttcgacaatttcgagtttgttatgtggtgtggtgcgggcaaagacttggtgttctaaagcggcttttggtttttcagcgtccgacaagcgatcccattccggcccggtaatcgcattaatcgttggtgctaagcctaacttttcaccaattgctttagccgtcagtggatggtcaccggtaatcatcttgacatcgaccccagcagcgttcatttcggcgagcgcttggatgacttcatcgcgtggcggatcgataatcccggcaacccctaagagttgaatcccttgttggagttgttcatgggtaattgtagcagtcgttgttggcacgtcgagataaccgaccgccacaacccgtttgccttgttctgataaacgggtcacatcggcattccagtcatcgattgggaaatcgaccattgcctgttgggccattgggaataatttatctggagaccctttgatatagattcggtgcgtaccatcagttagttgcacgagtttagcaatgtagcggtaatccgaatcgaaaggtaacatgtcaatttctgtatttgttggtaagtcgtcgataccatgaaccttatgatataaggttaaaaaggcaccgtcagttggttcaccgttaatggtccaaccattgtcggcttgataaagcgtcgtatcgttggcttcataactagcctctaagaattgtgtgagggtggtatccaattcagcaggttggtcatttaataaaatctgaccttcgggcgcatagccattcccgctgacttggtaagtcgtttcggcggtgataatttcggtcacggtcatttcgtttttagttagcgtccccgttttgtcggtcgcaatcacgtcgacggagcccaacgtttcaacggcaggtaagctcttgacgatggcgtgtttgtgcttggccatgtcgctgacccccattgcgaggattacggacattgttgcgggtaatccttcaggaattgaaccgaccaccatcgtgacaatcgcgattgctaatactgagagtgagtaatgttcgccaagtaagccgaagaggaataaaaagacggccgcaccgatgacgacaaatgaaacgccggtccctaagccgttgatttcgcgagtcaatggggttgggcgggttttcgtttcggtgacagcaactgagatttgcccgatttcggtatcagcggcggttgcgacgaccacgcctaagccgctcccgttagtgacggaagtggaggcaaaggccatgttgacttgatcggcaagggcaacttcttcttcggttaagcgtgttgcaattttttcaactgagtctgcttccccggttaaggctgattcttgaatacgcagattatcggcatcaacgattcgtaaatccgctggtacactatcgccagcttctaggaagataacgtcgccgaccactaagtcttcagttgggatgtcgatccgctgaccgtcacgataaacggttgcttcggttgccaacatttctttgattcgttccaaagcatcagatgcgttcgcttcttgataataaccaatgatggcattaatgatgactactagaccgatgatgatggcatccgaatagtgacccatcatgagtgttaatagggctgcgacgattaggatgtagatgattaagttgttgaattggcgcacgaaaagttgccacttcggggtgtgatggctctcgagtttattcggaccattggttgctaagcggttagccgcttctgtttgcgaaagcccctgttcaaaatcttggtgggcataattggtttgcagttcgtctaatgtttgttgataagcgtgtgttttagtcatggtaagctccttttaattatcgaaagtcaaaatgcggtcgttcgtgatcgttattcttgccgataataaggaataatctgatgaattaaacaaaacgcttcgtccgagccgtcatccaaaaatactcacctccagttagttattactctaaaattatcaggaaaaagtagcgatgtcaatctaatgaatactattaccaattcaacgtttaaactttgcgcccagtgcggctttgtggtagtattattacataagttaaaaaaacggttgaagcattgcgcgttcaagatttccttctttagggtggtagaagggaattttggcgtgctttttttatggagggaaatgaatcaatggcaactttagcaattattttaatcagtactttattggcaggacacatgagcaaacggattggaatgccagctgtgattgggcaactcctggtagggattattcttggacccgcgttgttcggtgtcttacatgaaaattcttttatccacacgttttccgaaattggtgtcgtattattgatgttcatcgctggcttggagagtaacctgaccttgttgaagaagtatttcaaaccaagtttagtggtcgccgtcttaggggtgattgtcccggtgatcagtatgtatgggatgagcttggcctttggtattagtcaacttgagagtttattcatcggggtgatttttgcagccacctcagtatcgatttcagtcgaagttttacgtgaattaaacgtgttagaaagtaaagaagggacgattatactaggtgctgcggtagtggatgacttactggccgtaattatcttgagtgtcttgaccagtctttttggggcgcaactggctgcagctagttcaacccacatgagtttggggttgagtttattgctgcaagctttattcatggttgcggtctactttagtgtgaaatggattgtgccatttgttatgcatttgagtcgtcgtttgttagtaccatatgcgagcgccattacatcgttaatcatttgttttggatttgtttggttcgctgaggccgttgaattgagtgcggtagtgggcgcgtttttcgcagggattgcgatttcgcaaaccccgtataaggaagagattaatcgccatattgaaccgattgggtataccgtatttattccggtattctttgtcagcatcggtttatcgatgaacttagcaagcttgaatcaacatattctatttattacgattttaaccgtgttagctgttttctcgaagttaattggaagtggtctcggtgcgcgttggatgaataattcgccacaaggagcctatacaattggtgcggcaatgatttcgcggggcgagatggcgttaattatcgcgcagattgggtacaacgctaaattgttgagtgaactttattactcagagattattttcgtgattatcattaccactgttttggcaccgctgattcttaaacacgcggtgaaacgccaattagcaactgaaatcaattaagaaaaatcgtcagctatttgctggcgatttttttttgcccttttttaaagttgacaaaaaaaggattgagcagtacacttatcacgttaagaaaaacatgtatttaattacattatatgaaggcttttaaaaggacaaaacaatttaaagaattagaagatttcttagggacatatttcatttacacttacgataatgggtggaagtatgaatggtatgcaaagaacgaccacacagttgactaccgaattcatggtgggatggttgcaggtcgttgggttcgtgatcaagaagccaacatcgttaagttaacggacggcgtcttcaagattacttggacagaaccaactgggactgatgttgcgttggacttcatgccaaacgaaaacaagttacacggcatgattttcttccctaaatgggttgaagaacatccagaaatcacagtgacctaccaaaatgatcacattgcactcatggaagaatcacgtgaaaaatatgaaacatatcctaagatgttagtgcctgaatttgccacaattacttatatgggtgatgcaggacaaaataacgaagacgtaattagcgaagcaccttatgaaggtatgattgaagatattcaagaaggccggtatttcgatgctgactatcgcaagattcaaaaataggcaagctgcttgactaatcataaatatttactaattatgacaataagtaaataattgattttataaagcggtttcgttataatgaggtcatggttaaataaattaacgaggtgaactggacatggcgattcaagtaggtgatttaattcgcggccaatcaaacgaaattatgtctgcgacgtagatcggtaaggttattgagaaatgtgaagaaactgtgcatatcttaatcttgaactatgcaccaactgatcgttttacggttcacaagttgatgcaacgaattctagtgaattcacaacaacttcgtgcaatttcgttaacgaaataactccctaatacccatagatttctccctataaaaaaacgaccactcccaagaaaaggtcgttttttttatgcataaaaagcggtctaatcacaaaggcggcgcttgcatcttgttgctcgctcacttatagtgaaagataagtgatggcaggaggaatgtgcagtggttgaaaaaagaaagttaattggaacagatgaaccagcattttatgaattagcacaatatgcgtttaataaaccggatagtgctaagcgccaagaattcttcaaacagttgtatacacatagtgcagggtttggcgtttttgatgacggccggttggcaagtggcttattagcgacgccgtttgacgtacggctcaatgggcaaacctttaagatgagtggcattggttatgtcgcgagttaccccgagtttgcgggcaaaggtgggattgcagcattgatgcaactcgcgtttgaacacatgcgtgcagaaggtgtgacgctttcgtatctcgcgccattttcatacggcttctatcgtcggtttggctatgaacaaacttttgatcagacgcactttgagattcaaacggctgacttaccacgattgaaatttgcaccgagtgcaggataagtagtacggatgacattggcgcaagcggtgccgttgattgatgcgttcttcaatcagcatccggacaatcaagtcggtggtgtgcagcggactgattggtggtggcaatatgatgttatgaagcatagtgattgggaagtggcggtctattgagaagatacaggacgggttgcggggtatatgatttatacgcgccaaccagagacgtttgtgattcaagaactgatgacctcgacagttgcaagtcaagaacagctattgagctttattcttaagcatcagtcagcttatgcgacaattcagtatgagagtgcactgactgagtcgctagctgatttattgcctgatcccacaatcgtaaagacgacaaccgtcccttatatgatggcacggattgtgtcactagctgatttcttcgcgcgttatgcctatcaagtagcggaactatctgcggtaacgattgcggttcaagatgatttcttacctgaaaatgccggtttatggcagttaagtattcatgcaggacatgctgctgtgacaaaattagcaacggggaccgcagacatcaccgttacgattcaaaatctaactaaggcgatgttggggtatcgcacacttgagagtcaagcacactttgggcatgtgcaagggacaccgcagcaaatcgctcaactcagtgctgcgtttagtcatacgaaaccgatgttatgggattatttctaaattgaacatcaaaaaaagccaatcatccaggtaatatctgaatggttggctttttttaattaagcaagttggacaatctgcacgttggcatttaagacaccggcagaggggatgtcacaatttggcattgcgacgtctaattgttgtgagttagaagcggcgaaggttccggtatcgttgacaacacggtaccatacttcaccggtacttaatgtgatcttgatttgtgagccgcgggggataacgcccaagtgcgcagcgactccggcgtacattccaccgggcatacttgttgcgccaaggaccgcgggatcgtaaaaggttaatttgaatgtccctttgtcaattaaggttggttcggcaggtgctggggccgcaactggttctggctcaggggcgggcgttggttccttaatttctgcggaatcaggatctggatgaatcggacagctaacgggtttgtctgttggtagaacagttgcgtgtttgaccagtgacgtttcagctgcttgggcaggttgccccgtgaattgttcaatggctttagatgacatcagcttttggacagggtggttcgtttctggtgctgcttcattggttaatgcggcacgcgcgatattcgttgtaattagcatcagcaatataaggccgatagctaacaagaatggtttgtttttgataataaagcgtcactcctaggtaagttttggaactaggagagtatatcaatgctgcatgtcaattaaatagcagtttctttacagaaatggggtaatttgtcatgttagtcatatgtttgtaaaatttaggaacttaattaaagggcgtcacgatggcgttgatcggcagtaagacgcgaatgggaatgctatcatgacgattactgttaaaatgacaaaaaacagggcaactatcgtaaagatagttgccctgtttttaagaattagatgagaaaatagccgaatacccctaaaatgattaagaataagaagttcatgccagtgaaaacgacaaggaacttaccaaggtctttgccccagcctttcttaaatcgtttgtaagcaatcaagtttgcaagtgaggcaaacattgtgccgaccccaccgatattgatggctaagaacattgcgtggctgtggttagtgaagcttgaaagtaaaatttcagttgggacatttgcaatcaattgacaactgataatcccggtgatgtaggtttgttttgctgttccgacaattgatcgcatgaatgtggcaatcgttgggatgtgacttaaattcccaacagcgatgaagaaacagaagaatgtgagtaataagccgtaatcgactgttttgaataacttaggatcaaacgctagaatcgcgataatcactagaattggtgtcacccataatggaattaatgagaacactgcgaggaaaacgacaaccgttaatggaacgaaataccacagtggccctttttcaacttcaacgggatgtaacccgtgaagtttgatgggttcttttggaaagaggaaggtcgttgctgccaacataatgacgctgacaatcaagacgggaattgaatattcgaagaaatggcgaatcgtcatatggtaaaacgaaacaaggaaaatattatgcgggctcccaaacggtgttaatgaagaaccgaggttagccgaaatcgtgatgagcgtcaccggtaagattggtgaaaattcaagttgacgcgcaattaagatgaataacgggacgaacgttaataccgtcatatcgttggttaagaacatcgcgccgacaaacgttagtgctaataacatctgcatcaaggctcgtttggaacggcttttgataattaactcgcgagcgaagtaatcaagcacgtggagccgttgataaacttgaacgagcgtcataatacaaaagacgctgacgatcacgtggaaattaacgtaactaagttgtgggcggttgaaaaatgaggtgacaatggctgcgatggcagcggctaagagtagtttgtcatctaagaaaaaatctcggatgttcaaagcaatgtttttcatatagattcaattatccttcttaatatagttatattattcaaaaaagcactactacaattctagactgtttacggggataaaaacagaaaaatttacaatatatacacaatttttacaatacatagcctctcattctagtaaacgtggttgactgtctcgcttgacgttagcggtttttaatttgaagaattaagtgattttactgcttattgcggctaaaattaggtataatataaatgaaatattggctactaagtgggtaaaaaaaaccgttaaccaaccattagcaccctaaaaaaacctaggtcagacaaataatagttgtctgacctaggcttttaaagtgataatttaatcgtttgcgccacagtcttaggaatcccgagtgcttcgagttccgccactgaagcttctttgatatgtttcatcgaaccaaaattcttcaagagtttcgtccgcgtcttaggaccaacccccttgatgtcatcgagtttagaactcaacgaattcttcccgcgtaattggcggtggaaactgatggcaaagcgatgcacttcgtcttgaattcgcgttaacaagtagaagccttggctctttggatccaactgaatggtttgatcaacttccccatataacaacgaggcggttttgtgatgattatccttgaccatccctgcaacgggaattgatagccctaattcgttctctaagacgtctttagccgcattgagctccacaattccaccatccattaaaatcaaatcaggcagtggtttatcctctttgagcaatcgcgaataccgccggaaaatgacttcccgcgtattggcatcttcgttggcgcctgcacgatctgtcgtttgcgttaacttatacttgcgatagagtttcttctcggcacgaccatcaacaaacgtgaccatcactgagacaggatcagtcccttgaatatgtgaatggtcaaacgcttcaatcacgtgtccatgtggtaagccaagcgcgtccataatctcatcttgcgccccaacggtcttgcggttgtcgagttccaataaacggaacttctcttccaacacaagccgactatttttctgtgccatttccatcaacgcttttttctcaccacgttgcggcgtgcgaatcggcacattcaaaatttcggtcaggactttcttttcgaccccttctggaaccagaatttcgcggggtaacacattattcttgcggttgtaccattgtaaaataaaggttgccaattcttcttcaggtgtgctgacacacgggaagagccgcttttcacgccgaatcaaccgtgcttggcggatgaagaagatttgaatcgataaccagcccttatccaaataaaaggcaaataaatcgcgcggggtattatcgttagaaataattttctgcttttcaacggtggcttcaatgtagtggagctgatcgcgcaattctgcggcgcgttcaaactgcatctcttcagcagccgtagtcatcttggccgtcagttcttttttaaccggatcaacttgcccattcaagaaacgtttaatctccttgatttgggccgcatagacactctcaggcacttctttgaaacacgcgcccaaacattgacccatatgataatacaaacagggccgcccttgatgtccctgacagcgtcgtaaaggataaacccgttgtaagaatcgcaatgtttcttgggcggcatacacgtccggataagggccaaaataaaagccgccatcttttttgacatcccccgtgatcagtaggcgcggatcgcgttcattcgtaattttaatgtaggggtagcctgtgccccgcttaagtttaatattaaagtaaggttggtgtttctggattaacgtaatttccaacaaaaaggcctctttatttgtcgatgtgatgattgtttcaaaatcgacaatttcagagaccaatttggccgtttttccttcgtgactactcttgaaatacgagcgcacgcggtttttaagattttttgctttacccacatagataatcttggcattgatatccttcatgatataacaaccaggtaatgcaggtaagagtgctaatttatgttcaatgtgttcgcttgccaaaaacaccactcctttaattcaaaacaagtgttcgtctttctattttacgtgtttttggctaaattgcaactattgtgctaggaccttggctaaaaattgttgcgtccgttcttcttgcggatggtcaaaaatggcttcggggtcccctttttcgacaatttgactatctgccatgaaccagacttcatccgccacttcgcgcgcaaaccccatttcgtgggtgacaacaaccattgtcatcccttcttgtgctaagtcttgcatgaccttgaggacttcgccgaccatttctggatcgagcgcagatgtcggttcatcaaataacaatacgtcgggtgacatcgctaatgcccgcgcaattgcaatccgttgtttctgcccaccagagagttgatcactataagcatccgccttatccgctaaaccaacgcgttcaagcaacgcttttgctttagccgttgtttcggccgctgattctttcttcactttttgtggcgccaacgttaagttatcgaggacagttaaattggggaaaaggttaaagttttggaaaaccatccccatctttgtccgaatctgatcaagctgtttttcagataacgtcatcaaatcggtgccttcaaacagaatttggccactcgttgggtcctctaaacggttcaagcaccgcaataacgtactcttacccccaccggaagggccgatgacaacaatcacttgaccagcttggacttcaccactaacaccatttaacacgaggttgtccccatattttttaaccaattgattaatcttaagcatgttgcatcttcctttccacatagttcaaaagtttcgagagactaaaggtcatgataaagtagatcaccatcgcaacaaaaatcggtgcaacgcctttataagttgctgattgaaccactttgagttgataaattaaatcagtgaccccgataatggaaacgattgaactttccttgattaaagaaatgaattcgttccctaaagcaggccagatattcttcagggcttgtggtaaaacaatgtaacgcattgtatcgcgttgtgacaagcctaaacttcttgaagcttcagtttgcccagcatcgatcgcattgatccctgaacggataatttcagcaacatacgccgcactatttaaggaaacggcaattacccctgccaaaagtgctggaatgttgacccataagccaatcccgaagtagacaaacatgatttgaatcatcaacggtgtgccccgaacaaattcgatatacatgactgccagcgcacgcaccaacttattcttggccaaacgcccaaaggctaggaggaccccaattaaaatcccaattgcaattgaaacaatcgtaatgaataatgtgtagccaatccctttagcgaagtatgaccaatagtgccacatgctagtgttgtgcgtattgaccttcatgagttggcccgcgttctttaagtattgcggaattaatttttgctttttaatttgcccgatactcttattagcagcagcgactaaggttggcgaatcctttggaaaggcaatcgctgatccttgcatgtctgcgcctaaatcaaatttcccattaatttgaacgagttctggatcattacttgcataggcggttgcgactggttcttccgccacaatcccgtcgattttatgactctttaatgcaaggacgagatctgggactttggccaagcccgtaatctgcgcatctttaatttgctttttagcgagtgtttgttggagactccccgtttggacccccacttttttcccgttaaaactatttttggagtggtaaatcttcgcatcagctttattgactaagattgattgaccaccgagataataaacatcagaaaaatcaacactcttgcttcgttcatccgttggtgacatcgccgaaataaccatatcgactttaccggtttccaaaccaaccaataacgcatcaaagtccatcgacttcaccactaacttaacgcctaaatcatcagctagcttctgtgcgacttgaatatccataccgacaatcttgttcttaccgtttttattcactaaaaattcataaggtgcataatcggggctggttcccaaaaacaacgtttttttagcttgcacttggctaaccgtctgtccagctgccaaaacgggctgctgctgaatcatgaaaaacgttaacattaccatgaatggtaacccaacaaaagtgagtaattttttaatcgtcatattatctcctcctctgattagtactatcatacaaccaattaaataattatgcaatatttatttataaaaagtgaatcattggcgaaaccgttattatctggtatgatagatgcaaattagaaaagagggattacgatgggcttaaaagtcactaacaagaccgatttaaccggtttattcgataaattcgcatcactaccagaagaacgccaaaaagttgaagcacaagttgaagaaacagctgataaattaaaaaaggtagatgcagaacaaaaagaaaagcattaaacaaagacagcaaaaaaggcggtaagacaaattcatttttgtcttaccgcctttttgctggtttaaacgtgcgtcatttgcaatcgcctttcggttaacgcgattgtacgctttattctgcgtgtctttctgggtagcgttgttttaattgttcaatgttttcgcgcgcgactttatcaaagtcgaggttattccattccgcaatttgtgataaataccaaagcacatcgccgattttcttagacattattttttcatctagttcgtggccttggaacgcatattttttaacgatatcaaccacttcaccactttcacttgctaagcccaaagctaagttagttaacacttgttcgttaccatataacgttcggttggctaacttttgatagtcattaaattccattatgcttgtccccctattgcacattgcttttcaatccattcccaaactgtctctttaccagcaccagtcagtgcgctaaagcagacaaattgatcgactggattaaaatcaagcgcttctttgatgattttttcttgacgattccattttcccgttgagatcttatccatcttagtagcaaccactaaaacagggatatcataatacttcgcaaaaacgtacatcgcgatatcatcatcggttggttcgtgacggccgtcaattaatgaaataagcccctttagatttgagcggctggttaaataagcctcgataatttgcccaaacttctcacgttgcttctttgaaactttggcatacccataaccagggacatcgacaaagtaaagttcgttttcaacgcggtaaaagtttaaagtctgtgtcttacctggcttgctagatgtccgggcataactcttacgattgattaatttattaatcaatgaagacttaccgacattcgagcgaccagataacgcaatttcaggtaattgatcagttgggtactgcgaagcagctaccgcactcatcaccatttcaacatcatgtacttccataataacctccgattatttccttcgaatgttagtttagcataaataaataattattgcgccgttgacatctctctagtttcatggttaacatatcttcttaaccccgttaaatcgcgtcattgtaccgtttcaaaagtcccttaatgcaaaaaaactgccgcgacaaaatctaatttgtcccggcagtcttttaatttttatgacgcttcttgtccgtcagctaaaaagagttgtgggttggctgtgccatccaccgcttctttcgttacaacaactttagccacgtcttcacgacttggaatatcaaacatcatatccatcatgacttcttcaatgatcgaacgtaaaccacgggcccccgtgtttcgttcaatcgctagatgtgcaatcgcatggagtgcttctggtgtaaattctaattcaacattatccaaggccatcaacttgctgtattgcttaacgagcgcgttcttaggttcagttaaaatatgcaccaaatcatcttcagtcagtttttccaatgcagcggtaatcggaatccgaccaatgaattcaggaataatcccaaatttcattaaatcttccgttacaatttgttgcattaagctttgatcttcattggtagtttgaccattcttgcttccaaaaccaattgtcttttcacctaagcggtttttaacaatcgtttcgatgccgtcaaaggcgccaccaatgatgaataaaatattggtcgtatcaatttggattaactcttgttgtggatgcttgcgaccgccttgaggtggcacactagcaatcgttccttcaagaatcttcaagagggcttgttggaccccttcaccagaaacatcacgcgtgatcgagacgttttcactctttttggcaatcttgtcgatttcatcgatgtaaatgatcccgcgttcagcacgatcaacatcgaagtctgcattttgcaacagcttcaagaggatattttcaacatcttcacccacgtaacccgcttcagttaaagtcgtggcatctgcaatcgcaaatggcacatttaaaatccgcgctaaggtttgcgcaaggaatgtcttcccggaaccagttggtccaattaacgcaatattactcttttgtaattcagtatcgccttcttcggccactgacatttggttgacccgcttgtaatggttgtagactgcgacagataaagcttttttcgcttctgtttgaccaatcacataatcatttaaaatggctaaaatttcttttggctttggcacttctagtaaatcactgaaggcctcatctttaaactcttcatcaataatctctttgcaaaggtcgatacattcgttacagatataaacaccagggccagccacgatctttttcacttgatcttgcgacttcccacaaaacgaacacgttacgggtccgttagttgtttctgtatcatctagcatactgggattctcccctttctcgatatacgcttaccgctgtgagtcgttaaaatacacccctacaacgtaattcagactatagcataactatggtctagaataaagtaaagttactcgcacaccgtcaatgacacaaaagcgggtccaaagtaaacaccttgaacccgctttttagcatcatttaaagcttggattgatcagacgaccttatttagcgtctttcacttctacagctgaatcagcaatgatttcgattgctttcttaacaccgatatcatgttttaacatgtcatctgataagacgctacgaacagcagcttcttccatattgtattgttcagctaaactcttaagttctgcagcaacttcttcgtctgttgcttcgatgttttcagcttccacaacggcttcaagtacaagacttgtcttaacgcgtttgtcagcatcaccagcgaattgtttcttcaaatcatcttcagttgtaccagtgatttgatagtacatttccgggttgataccttgttgttgcatgttacctaagtattgttgtaattgactgttgatttcttcgtcaatcattgcttgaggtaattcagcgattgttgcattttcagttgctttagcaacggctgtatcttggatagcagcatctgcagcatcatttttttgttgttttaattcttcacgaattttttcttttaattcgtctaatgtatcaacactttcgtcgatatctttagcaaattcgtcatctaattcaggtaattccttagctttcacttcatggattgttaccttgaagatggcttctttaccagctaattcttctgcttggtaatcttcagggaaggttactttaacatcaacgttgtcgtctgctttgtgaccgactaattgatcttcgaaacctggaatgaatgaatttgagccaagttctaatgaatagttgtctgcttgaccaccatcaaaaggtacgccatctacagaaccagcataatcgatgacaacagtatcgcccttttcagcagctgcgtcttcttttaataccaattcagcttgacgttcgcgacggttttcaatttcttgatcaacgtctttgattgtaatgcgacggctttgttttggtacttctaagcctttatagtcgcctaaagttacttctggtttaacggtgacttgagcagtaatcacccaaggttcgcctttttccattttttcaacattaatttgtggttgatcaactggttgaatagcagcttctttaacagcagcatcataagcttctggtaagattgcatttaaagcatcttcataaagggcttcttcaccatacatcttgttaaagatttggcgaggcattttacctttacggaaacctggtgtgttgatatttttacgtacacgtttgaacgcaacgtccaaaccttcactaattttatttaaatcaatttcaaaggttagttcaccatcattggtgccctttttttcccattttgctgacataatttccctccgacagttatattcacaatctatcaattgcatacttaatcagcataaactatttaacctaaattgtaaatatttattggtctaaaaagcgataaaatccgatattttagtcgtttcaggccaacttttatcgaatttaatgcacaaaaaaactcgcagtttttacactacgagtttttcgattcaactaggttgaatattagtcgataatttcactaacgacaccggcaccaacagtacggccaccttcacgaacagtgaacttaagacctttttcaatagcaactggtgagattaattcaacagtaaatgttacgttatcaccaggcataaccatttctacaccttctggtaattcgataacacctgtaacatcagttgtatggaagaagaattgaggacgatagtttgagaagaatggtgtatgacgaccaccttcatccttgctcaagatataaacttcacccttgaagttcttgtgagtttggattgaacctggtttagctaaaacttggccacgttcaatgctatcgcggtcgataccacgtaataaagcaccaacgttatcgccggcttgaccttgatccaatgtcttacggaacatttccaaaccagtaacagttgtcttagcaacttcgtctttcaaaccaacgatttcaacttcgtcaccgacagtaacttggccacgatcgatacgacctgaagcaacagtaccacgaccagtaatcgtaaatacgtcttcaacaggcatcaagaatggtttgtctgtgtcacgttctggagttgggatatattcgtcaacagtagccattaattcttcaacagctttaacgtcgtcagcattgccgttcaatgcaccaagtgctgaaccgcggataactggaatatcgtcaccagggaaatcgtattctgataataattcacgaacttccatttcaactaagtccgttaattcgtcatcatcaactaaatcagtcttgtttaagaagacgatgatgtagtcaacaccaacttggtgagcaagtaagatatgttcacgtgtttgtggcatagggccatcagttgcggcaacaactaagatagcaccgtccatttgagcagcaccagtgatcatgttcttaacgtaatcagcatgtcctggggcgtcaatatgtgcataatgacggttttctgtttcgtattcaacgtgggctgtattgatagtgataccacgttctctttcttctggagcagcatcgatgtttgcatagtcttgagcttcagccaagcctttgtctgccaacatctttgtgattgctgctgttaaagttgttttcccatgatcaacatgtccgatagtaccgatgttaacgtggggttttgttctttcgtaatgtgctttttctgccattaaaacgaacctcctgtattttcgcaagaaaaaatcagtgtttagatttactaaactgataatcctttacataatattataatacttcaagcgctaaaatcaaagtgtttttttacacttgaagaattcaaaaatgattatatctgctatgagcgcgtttgtaaacacttaatgctcaaaaaaagtcagttttgaaacgatatttaggtgttttctactctaaaaatcaagtttccctgtcatttcttgcaactttttcacccagtcctgtatcttttctgaaataaccactgacgcggtataatccggacccagtaactgtttgagccatgcttgcgcccactccgtaggattatacatgatttcagcttcaaaaggatataaatatgcaaatcccatctcaacatccgccatcacttgtgctaacaaagtcggatcttcagtggctaactgctcatttaacgccgctaacaccgcattaaacgtcgggctctcctccatcaattggatatcggcaggtacaaaagtttttgtctgttcaaaccattgcatcgtgactaattgttcaatattcagctggacgagcgtttcaatgacagtcgtcttcacgaaagcatgactgtaaggattcgttaaaatgggcgcaatactggtgacataaacattacgtggtaattgttcagcctgcgtcaacattgctagctgttcagctaatgggtgcgcagtgaggttatagaggccctctgcttgcttttgaatcgctgcttggtgattcgcttggtattctaattccgcagccgtaatcatcattctaagcgtcttaatgacttgcggggcaatcgtcgcatggcgtaatgcctcccacacttgatttgccgtaataaaacggtggttattcagtaataatgcaagataaaaccgcactaaatctgtttgttgtaagtagtccgcttgttgttcttcgacgattgtcaatgctgtttgcggatcaccagcttcaatcagcgcactggcccacaataaattcgccgacaacgtctgttctagttgatacgcagcttcaaaatggtcgcatgcttgctgccaattttgttgatttaacgctactttccccatccgtatcagccgatcatactgatctggaaattgcgtaatgtcacccattcaatcacttccttttgacaattaataaaacaatagcgcctagaatcaactgacctgatccagacgctattgtttctaaatgttattcagcggctttttcagcctttggtttattatcttttctttgacgacgatgattttgattaatttccataatcactggtagaatcactggccgacgtttcgtttgttcatacaagtaatgacttaagttttcccggacatcttgtttcaaatgactccagtcaaattctttgttgtccagattattttgcaccgcatttttgataatttcggcactctcagccattaaatctttgctagtcttcacgtaaacaaaaccacgtgcggtgactttcggttccgcgataatcttcttattcttgcggtcaatcgtaacaacagcgataaaaatcccgtcttctgataataatttccgatcgcgtaaaacgatattcccgatatcgccgacaccgctaccgtcaatcatgacgtcagttgcgtcaacttgtccgccaacatgcatcttccctttttcgtaagcgacaatatcgcctttaccaacgatgaaaatatctttgtaatccattcctgtttcatgagcaatatcagcgtgtgctgctagttgccggtattcgccttgaacaggcattaagaattttggttgcattaaattcaacattaattgcaagtcattcttattggcatggcctgaagcatgtaaatcatcgccaaccgccttaacttcgccacccgcacgataaatcatatctttggtcttcgctaaaatcgtttccatcgcgtgtgaaggagatgtcgttaaataaaccaagtcgccttcttcgatgtgaattaaacgatgatgactagttgccatcttttgaagcgccttgattggttcgcccatccgacctgtttctaagatcactgtttgttctggtgcaagtgtgcttaaatctttaggttggaccaagatatcgtcatctggcaaaataatcatcgataatttcattgctgtccggacgattttttctaaatcacgacccgttaaaaccactttacggcctgttttataagccgcatcaatgacttgttgaatccgcataatatttgaagccactgaagccacaatgatccgacccgtttgatacttgaacgtttctaagatggattcagcaatatcgcgttcgttagccgttgcaaatggtgattccgcattagcagaatcactcaagagtgctaaaacaccttgtttgccaatttcagctaagcgtgcataatccgtttgatacattggcattgctgattgatcaaacttaaagtccccagtataaacgacttgtccttcatccgtcttaacgacaatccctaatgaacctggaattgtatgcgttgtcttgaagaatgaaacggttgcgcgttcaaaatcgattgctgtattcgcatcgatgacgtggaagttttggaacttacgtaattttggttcgctgctaaccgtaattttagctaaagcaatcgttaattcagacccaaagactggtacatcatgttcctttaagaaataaggaagcgctccaatcgcatcagcatgaccatgtgttaggaaaatcccagcaacacggtctgcattttcttctaaataggtcatatcaggaataacgatatcgatccccaataattcagtttctggatatttcaacccacaatctaatacataaatttcgtcgtccacttcaacaatgttcaaattcttaccgttttcacgaacaccgccaagtggcataatcttaatgttactcattctttcacctctagcacttgaggaatttattccccaaactattttgtttgttttagtcgttcattcgtttaaaactcatccgccttaaagtctaactcatattttatcacaatttaaacaaactaacagcttttgattactaaaagccttttgagcacaaaaaaagcgggtccgcataacggacccgctttttgaaaatgaattaacgacgtaagccaaggctcttgattaattcacggtaacgttgaacatcgctttcacgtaggtaacgtaataagttacgacggtgaccgatcttcttcatttgaccaacatatgaatggtgatctttcttgtgaacagataaatgttcgtttaatgagttgatttctgcagtcaatacagcgatttgtacttctgctgaacctgtgtcgccttcgtgacgagcaaattggttaatgatttcgttctttttttcttgtgaaatagccatgctaatttccacccttctggtataatagcctagaacaacgtaaagcgtcgggtgaacgtcgctaaacagagtagtaggcctgtgcaataagcacttttcaagtttactaaatattagcgtcaaaagcaaggcacagtttcaaactatttaagcagtcaagttgaaatactttacaagtttttattgcaatcactctcactattttggtataataacgactgttgaaattaaaaatcttttttataaagatagtgaaacccatcggaggtgaacaacatgccacaaattaaatctgctatgaaacgtgtgaaaacaattgaaaaagctaaccaacgtaacgcttctcaattaagcacaatgcgttcagcaatcaaaaagttcaaagctgctaaaacagcaggcaacgaagaagctgcagacctattgaaagctgctacacgcgcaatcgatatggcctcaacaaaaggcttaatccatgccaacaaagctggccgtgacaagtcacgcttaaacaaaatgatggctaaataatttaaccacaaaaaagcccccacaaccatttggtttgtgggggctttttttgctttaagcaacatcatctgtcgcaaattgtaacataaacagttcaaacaataaggttgcttcaccttgcccagtctttattttttcttcaatgccctctaaacctagataggcttgggcaagcgtcgccttagaaaagtgccgaatttgttgcaatgctaatttgatgcggtatgggtgaatttttaagacgctcgccaaattaccttggctataccctttttcaaaaagaattttcacttggagtaacaagcgaaattggcccaacaagatggcgttaattttcagcggttcttctttttgtagcaataaatcgtgatacatctctaaaaccggaccgacctttttttgtaaaactaacggcaccaattcaaaaacattatcttcaatactacttgccactaatgcactaacggccgtttcagtaatcacccggctttgttgcgcgtaaagcagtaatttgggtaactcagccataatctgactgtaatcaccattagtcttgcttaacaataacgtcattgccgctggttcaatcgtgacttgttcactttgcagttgcgctgtcactaactgctggacctggcgctcattaatcttttgaacgtcaatgacagttgccatcttcttcagttgtttaacaatcttcttgcgttcatccaacttcgcgtatggcgcgaagataacgagtgccgttgtcggttgtggctgttctaaataagcttggaatccttttaaatcatgatcaagtttagttttaactttttcacctgttaagaagaatggattctgcataaaaacaattcgtcgctcaccgaaaaagggggccgattccgcatcttctaatgcccgcgccacctccgtctgggcgagatcataactcgcaaagttcatcgtcatttcttctgtcgaaagcgttgctttaaataacgctctaacctcttcaatcagcgctgactcttgtcctaatacgagatacaccggtgcaaacgttcctcgattcagtgctgtttttagttgttctgtcttcatttagtcacaatcctttagtgttgttttaatcattggcacttggccaaaaccatagcgccattccagcatcccacagtcagccgtattccaaaatgggacgttcgcacgttttaaagtctgcaacgttgcgacatgtggatgaccataacgattatggcgtcccgcagaaatcaacgccccttttacctgccacgtcgcaattgacttgggatcactcgccgtttgactgccatggtgacccacctttaggtaatcaacacgtaattgtgggtagcgatcaacgattgccacttcacccgctttttctaaatcaccagtaaataaccaactcgcaccaccaatttgcgtttgcaaaacgagtgagtcagcattcccgcctggtccggccaccactggcgctaacacattgatttgttggtgaccaatcataaaatgttggtccgccaaataaggctcaattgcaacttttgtaagatgcggccgcacttgccgttgaaactgccggttttgcggtaagcccgcagcacaaatcaaccgtttaactcggatatgttgcataatttcatttaagtcccctatatgatcagcatcctgatgcgataatgcgattgcctctaaatgatcaatgccacagctgtagaggtaattaactgttactttttccgcccgactcacaatttgccgccgttgccacttttcttgcggtaaagctagtcggccgccggtgtcaattaacaggttatgtcgattgaagggttgttgaatcaacaggctatcgccttgcccgatatcaaacataatcacgcggccaaccggattaaagtggataccaataaaactaatgacatacaggctgataacagccccccagccccactttgctcgccgaccagtacttgccatcaaccatagtgtgcctatcacaattaaaaagagtggtattagctggattttaccgaaagtaattgtcgcatatgggaacgttgcaatccaagctaatcctttatacagcgtcgttagcaggccttcttctaaccaaactatcatatgactaacaggccataagcaaatcgctaccataatcaaacccaacatgactggtaagaaaatcggcgcgacaatcccattaatcaaaatcgtcaagatatgccaacgataattaaaccgcaagcacaccggtaaacttaacaagcctagccaaaatgccgttgtaaaagtaccatggcgccgctgataaatcaatccaaaagccatcagatagctcagcaatccccccatactgattaataaatacggctgccataaaagattgaccagcaatacccaactccaactatctaaacgcgattgctgaaaatgacttacttcgcagattaatcgtagtaagatcagcccgatagcgcgtgtaatactcgtgcctccccccacaaacaacgcataaaggggtagcaaacaaaacaagctaacattcacccattcacgcgggactcgacacagcgttgccaatcgacgaatgattgtcacaaagtagaatacatgcaatccggataaactcaataaatgaataatccccaattgacctaacacattctggtaggccaggccatctgactctcgaacaccacataacaacgcctctgcatgaaaactcaacgctggtggcaattgtcggagataaatcagcccctgttggcgccgttggtggaaccaatctagccaaccttgtggtggaatgcgtctaaagaccgttccgtcaattatatttgcttgataaaaacaatgcttttgctgccccataaagcgcgcatagtcgaactcattccggttagtagcaccttggatacgctctaattcaatatcacccgctaataataacggctgattcgtcgtttgccaacggcgtttttccgctgaactctggcagcgatagtagcaaacaacacgttggtcatcattctgcccctgcgccattaattgaatctgatcgccagccactttgatcgtatcgggttgaatcttatatacttgattatttggtctaaccggctgttcgtaggtgcgccgtgccagccaaaaacggcaaccgcctaaacacagtaccagtccactgaccattaacacagctggttggcgtaagcaccacagtcgcagtagacacactatcaaaagacagctaaaaaaaagtggtgcttgtcctagtaataacgcatttaaacttgctaaacaaataactggataaacccagttattcttaatcactcagcagtttgttcattctccaaaaagttaacgagggtgttggcgtcattcgccgttaaatcgacttggtccaattcaataccagatttttcaatcaattcatacgcatattcgtcgttatgataatccttttgataatggattttactgatcccagcttgaataattaatttagtacactgaagacatggaaaatgtgtgacataaatttcggccccttccgtctgcacaccaaacttagcgcattgagtcaaggcgttcatctcggcatgaattgttcgtaaacaatgcccgtcccgtaataaacagccaacatcgatacagtgactttcatgtgccaccgaaccgttgtagcctcccgcaataattcgccgattacgaaccaccaacgcacccacaaacaatcttggacaggtgctacgcatcgacaacaagaccgattgaagcataaaatattgattccacggcattctcttttctgacacacgaattccccctttaaagttaatagttttagtatagcaaaaaaataccattcacaaactaattaacacaaatttgtggccgtaattgttcaaacgttttcggcccaattcccccaactttttgaagatcttcgatttgtttaaactgcccttgctcatcccgatatgcaattatttgttcagcttttttaggaccgatgccatttagcgtttgcaattgtgtcgcatccgcttggtttaggttgattttagcatcagttgatatcggactggctcccgcttgattgtcagtcgcagcctgtggctcgtctgccgctttcactaattcttcggcttgcaccgcttctcccttagttggcacatagataataagttggtcactcaatgtttgcgctaagttcaactgactcgtatccgctgcttcggtcacatcccccgcttgtttcagcacctcaaataaacgcgtctttgcaacacaaatcggataaatccctggatgtgccacagcgcctttgatatcgacaaacccaccttttgagacgcttttcttctgtttgacgggttttgccttcacttttcgcttagttgattgcgccatcaattgttgattggttgatagaaaacgttgttgccgactatgctgccaaaacacaccaccaccaagtaaaattatcaccaaacaaggtacccaccagaatcgacgataccgttgccaatagtcgcgccacatttttcgccacctccttattcctaattaccccaaaacgcaaaaaaaatttgccgattctttcgaaccgacaaattttttaatgtttggctaaataatccaatgcatcgtccaagtttttgacaggaacgattttcatcttagtaccaatttttttagcggctgctttggcaatcgcataattattttgataatggggttctacctttagtatggcttttgtcacgggatcatcaggtgcgaaaaagactttggcgccttcttgactcgcaatcagtaccttcttatcaattccgccgattggtcccactgtcccatcaggatccattgtccccgttccggaaatcttgcgaccacccgttaagttttgtttcgttaattggttataaatctgtaacgtaaacatcaagccagcagaaggaccaccaatttcacccgcatcaatcttaaccggcacttttgtcacaatttttgagtgatctgtcagcgtaattcccaaaccagcgtagcgcgatttaggtaatttaatcaatttacgggtcgcagtcttacgctggccattatgttcatagctaatcgtgactttttgattcactttaagcccttgaacatacttgacgaacttatttgcactcttaaattgatgctgatcaattgccgtaattgtgtcaccaatagccagatcttttttaaaagctgaattatctaaaattgacatcacatagacacccagatattgagtgtggtattcctgatgtgccttttgataagccgcctcaatcgcaaaattaatcgagctttccatgtagtatttttgaatctgatcatacgcttcagtatcatcgtcacccattagttcatcacgactaataatctccgtaaaaggttgtgttttagacagtaatagctgtaaccccgtcactggtccttgaatcccgacggttgttaacataaagtggcccttatgctgatctcgttgaccgttaactttaacaaactggttggtattttcggccgaaccgaccccttcgacgtaataatgcgttgggataaagcaaaaagcaaacacgacgatcaagccaacaatccataggagatgcttcaatagacgtttattcttattcatattaatcactttcaggtcctaatttttgtgcaagcgcagacgcgacaaccggcggcaccaattgttcaacctggccaccaaacgttgcaatttccttcaccatacttgatgagataaaagcaaattcttgctttgctaataataacaccgtttctaaatcagcatcttgtgtctgattcaacgccgcaatatcacgttcatactcaaaatcattggcattccgaataccacgaatcaaatatcgcgcaccgacttctttagcaaaggttgccgtcaacgtcttcgattgtgcgattaccttaacgttatccaagtgttgcgtcgccgcttcaatcagttcaaccttagtggttgcgtcaaataacggttgtttagtagcgttagtcatcaccgcgataatcacttggtcaaacaagtgacttgcccgttcaacagtatcgagatgcccatttgtaaacgggtcaaaacttcccggaaataatgcaattttcggcatatagctgcctcctaaccaataaatttaaagattgctacttctgtaatcccataattctgttgccgtttcagtatgtaatgcagaatgtcagttggataatcaaccgtcgtatcggtttcgcaaagaatcgtcgcgtctggtgctaataaccccatttcgacgaattgttgtaactgaagcaacatctgttgttccttgtagggtggatctaataaaattaaatcgaattgaacaccagcatccgctagtttcaccaacgctttttcagctggcatcttccagattgtaaagcattctggcattttagtaaccgcaacgttttcttcaatcgtttgaatcgctgcatattggcgatcaactaaataagcatgatccataccgcgtgaaacggcttcaattgcgagaccaccgctaccggcatataaatcaagcgcctgcccaccgtcaaaaaattgccccaacatactaaacattgcttctttaaccttgtccgttgttggccgtgttttcatcccagggacagcttttaacttgcgacccccaaattctcctgcaataatccgcatctctattactcctctaattctgccgcatcggcaatttcttgatctgagcgtcctactcgattactgaaatccatatcaatagctggtctttcagaaggggtcactcgtttgacgtagtgtaatttttttaaccgttgcataacagtttcggcatctgccatatctacgtatagataaacatatttcattcgtttcgaggtgtaatacacaagtccgtaacggcgtaattgctttacttgtcgtaatgaatagagccagacgacaattccttggcgttgtgtgatttccaatgtcatttaatcagtccttttacatttagtcaaaaatcatcattgtttgttcatcggtacacagaagcgttaagtgctgatagcttggattattaatcgcaagttgcaacgctagattctgttgttgcgcaagcaccagcccttgggaattgagcccttgtggccaataaaaaagttgctcgcgctgcggaaaacccgctgctcttaacggagcctgtttaaagtcggttgctgttaaaaaggcgtccgtctcttgtgtcgcttgtttgcgcacttggtgcagcttttgcagtccctttttagtcaaccactgcgttggtgtacttgttaattcactcaccaaattctgtgtattttgcaatggtagttgatttatcgtgagcgcaggttggtcattattttggcgtaatgtctgcaacgtttgcaccaaagcgagttgtcgttgactatctgtttgcggttgttgcgactttgctagctcatccactgggactggtgtttttgaaacaactcgatataaatcagtttgtagcagtcggttcgcatttaaatacatcacagctgtcaatcgttcttgctgcatcactaaagttgcaaacgtctggtttttaaacatcactaacggcgtttgttggtgttgctccggcgttaaccgcaacttaaattgttgctcgtgtaacgtcactaagagcgaagttggtaacgccgtcttcttagttaatgtagcccgcttttgaaaaaaatgaaacggcgccacatcgttgtccgcaccaacaaccatgatttgttgtgtttgattggattggttatcaatcagcgcttcgacatactgtcggctatctaagtgaaataaccaccgtcgttgattttcatcagtcagctgttgctcgaccggttgcccataggttgcaattaattgttcagctggttgattaatcagtttcgccggcccttgtgttttcgtcagtggcgtttgttttattgaccgttcagtcgacggggcttgtgcaaccttaggctgattaaccgctggtgtttggataatcggccaaccataaaggatgaccaaccagacaatcaatgcaacgattaatcggcgtgccccttttatcatgctttcacctcactaattcgctgccgcagcttttttctcttgtgcgctgatgttcaacacgattcccagtgcaatcgctagaaccatcatacttgatcccccataactgatgaacggtaacgtcaccccagtaatcggtaagattcctagcaacccaccaacattgaatagggtttgcacgaaaatgatagtgccaattccgtaacataataaagtgtgatacatcttagtcgcatgaatccctaggtaaaaaatccgtgctagtagcgcaaatagtaacgcgataatcacgagggtcccaatcacacctaattcttcagtggtaatcgataaaataaaatcggtatacggttctggtaagtaaccgcgcttttggatactattgccaagccccaagccaaaccaaccaccattattaatcgcatagtaggaattcactaactgactcccacccatattttccaattcaaatggatgtaaaaacgataaaatccggttgaacttataagaattaacgttcgttgaaaagttaaagtgccgtaaaatactaaataaaatcataaccgttgttgtgaccgctgtaatcagcgaaaaaccataccaatatgacataccggtgccaaaaaacatgactaccatcacagcagccaagatactagcgccccctaaatcaggttgaataaacaccagtaggatgattccagcgactaatacaaccggactaaagaataattttaaattatcaacaaatccgtcggccagttcattttccttacgcgagagcatattagcaaggtaaataacaatcaataacttcgtaaattctgacggttgaatggtcagtggtcccaattgaatccacgcggtagccccattaatcgctgcgcttggtctgaaacgacttaacagcaataaataaatgagcgccaagaaaaccacaatcgtcattgcttttagaaaagtgcgattttttaaaacggataacttaagaaaatatgtgatcatcatcaagataaagcctaatgcgataaacactaattgcttggtaaaatacgcatctggtttcattccgcgaattgacattaaatccgaactcgccgaatagaccattaaagcaccaaatgcacataagataacatatggtagcaataaccaatagtctaaatactgaattttacttttttgaaactttttccacacagttacacctaatttctatttcgttcgtattcagcctgtccttgcccaacttgcatgccaatttgattgacccgttcttctaactcacgcatcaaagttgcaccctgtggcgcactaataagttgcatccgttttgcaaaatcaacctcgcgcgagaaaccaaataattgggtatcaattacctcttcaataattggacattgactcatacaaagcgcatcaatttgagcacgcaatagttgctcaatgcgtagcgcatccgcttctaaagtgagataagctgttgttttttgttcaatcataatttacgcctacctattcgttattaaaaagcatactctgttcgttattataccatatttatgcacaaaaaaaggtagccaagcggctacctctaatggtttttaatgattaaccttttttacgtttcttatcagctttttgacgcatacttgtgtcaagaatcttcttacgtaaacgaacagaagtaggtgttacttcacagtattcgtcatcgtttaagaattcaattgattcttcaagtgacatttctttaggtgtcttgatggcagctgagtgatctttaccagaagcacgtgtattcgttaagtttttacccttagtaacgtttacggcgatatctgtatcacggctgttttgaccaacaatcatgccttcataaacatcaacgccagcgccgatgaataattggccacgatcttcaactgattgtaaactataagttgttgatgaacccgcattgattgaaactaatgcaccgttacgacggcctggttcccagttcttaatcactggcatgtatttttcgaaggtatggttcataattccgtatccaccagtcatcgttaagaattctgttgaataaccgattaaaccacgtgaaggtgctaagaaagtcatccgtgtttggttattagcatcactttccatgttttgcatttcacccttacgttgggccattgagtcgattactgagcctgtatattggtcaggtgtgtcgatttgaaccatttcgaaaggttcgcatgtaacgccatcaatatcgcgatagataacttctggacgtgacaattgtaattcgaaaccttcacgacgcatttcttcaactaagattgaaagatgcaattccccacgacctgaaacaatccaagcgccggctttgtcggtatcttcaacacgaagtgaaacgtcagtgtgtaattggtgacgtaaacgttcttcgatcttacgaccagtaacgaaatcaccttcacggccaacaaatggtgaatcattagcagcaaatgtcatttgtaaggttggttcatcaatccgtaagattggtaaagcctcttgatggtcaactggtgtaacagtttccccaacatagatatcttccatcccagaaacagcgattaaatcgcccgctttggcttcttggatttcaacacggtctaaaccgatgaaaccaaaaatcttagttacgcggaagttcttagcagaaccgtcaagtttaagaacagaaacttgatcaccgatcttgattgtcccacgagaaacgcggccaatcccaatacggccaacatagtcgttataatctaacattgccacttggaattgaagtggttcgtcactattatcaactggtgctgggattgtatctaagattgtgtcaaagatagggttcattgtatgggcttgtgtatctaaatctgattcaagacttgatgtcccgttgatggcacttgcatacacaactgggaattcaagttgatcttcatcagcaccaagttcgatgaataattcaagcacttcatcaacgacttcttcaggacgagcgcctgggcggtcaattttgttaatcacaacgattggtgttaaatgttgatctaaagccttcttcaaaacaaaacgtgtttgtggcattgtgccttcaaaagcatcaacgactaataacacaccatcaaccatcttcatgatccgttccacttcaccaccgaaatcggcatgtcctggtgtatctaagatgttgatttgtttgccgttatatttaacagcagtattctttgaaagaattgtgatcccacgttctttttcgatatcatttgtatccattgcacggtcagaaatttctgcgtgaccatccaatgtatctgattgttttaacatttcgttaactaaagttgttttaccgtggtcaacgtgggcgataattgcgatattgcgaatgtcttctctttttttcaagtgtttcagcttcctctcgctagtgacttgactagtgttgtttgtctcatgtatacaagctattattttaccataaaaaaatgggctgtgcttcatatattagcgtttttttgaaaatacgcaagtttttttcatgaaaatttaattatctttaatcatttgaaccattcataatcgtgacaatttcttgtattgcttgctttggcgcgataatcatcccttcttttcgcatcatggaaattggttgaccatcaaattgtaaaacttgaaaacctaacgtctcagctaaaacccgacctgcagcaatgtcccatggcgctaatttggagatgtaagcttgcacttgccccttcaacaaatgggcgaaagtgataccggcgctaccgtaaatccgcacacccgaacattgatacaacacctcttgcaagtgtgcttcattggtgaccagcatccgtgtattgacacagattaacccttcttgcaacggctcgtcgacagcatttttgagggcagcttcgttttcgaatattcccaactgtggaccgccccagaacaattgatcggccatcacatcataaataatcccgaatagcggctgaccgtcttcataaacgccgatcataatggcgaaatttgcccgttgcttcacgaaattcatcgtgccatcaatgggatcaataaaaaaagttagtccctgttgccaatcatcaggcacctcaccggcaccttcttcccccactaattgcgcgttcggataagccgtcttaatcttttcagctaagaaagcttgattagcacaatcgacattagtcactaaatcattaggcccagacttagtactaaccgttaatggttgtttaatttgtgtgcgggtataggcagctgcttcaaggatccacttttgcagcgaacgacttaaccgatacagtgcttcttgttccattttttcatccactttcactaattaagcgtcattttgatttgggttcgactactcttctttgtagcctgcatacaccgatatattgaatagcctgacgcttctgaaaaggccttatcaatttgtttttcttgcatcttactttgaacaaccactttgaagtcacgataagcagcttgtaaatccgcaactttcgcaccaaattcataagcttgttcaacaagattatataatttcatgacttggacaacttcagttggcgtccagtctggttctaaaggataactatagttcgtttgcataaaggctcctaaaatttgcataaatttgcgccagtttcaattcaactgatgccattaatctctcatattataacgcacttttttagaagctgtcgaatccttttagaaatagcggaatcaaaaaacgacgcactcaactggtgcgtcgtcattctaaactatttattaaatatgaattggcaatcctaatgctaattcggcatcatccataatcgcttcacttaacgttggatgtggatgaatggttagagcaaggtcttctgcattcatgcctgattcaacggctaacgtcaattcagaaattaaatcactcgcgccaacgccagcaacttgagcgcccagaactgtgttgtcatccgtattcgtcactaaccgcacgaaaccttctgtatctgctaatgataaagcacggccattagctgcaaatgggaacttaaatcctttagcgttcattccttttgccttggcttctgcaaccgttaaaccggtcgttgccaattcaggatcggtataacaaacagctggcattgcgtggtaatcaaccgttactttcttaccggcaatggcttctgcagccactttagcttcataacttgctttatgcgccaaagctgctccagcaacgatatcgccaatcgcatagatgcccttaacgttagtttggccttgttgatcaacttcaatcaaaccacgatcagccatcttaataccggcttgttcgagtcccatttcgtcggtatttggccgccgaccaacagtcaccatcacgtaatcggcaacaagttgttcttctttgccgccgacttcatatttaaccgtcacattttgatcagtttcaacagcttcttttgccattgcgccagtaatcacatcgacccctttagccttgaagttctttgtcaccaattgcaccatatctttttcgaagttaggtaaaatcgagtctgtcccttcgagaatcgtcacatgtgcacctaagttggcataggcccctgctaattcagagccgatatagccaccaccaatgaccactaattcttttggtacttccgttaagcttaaaccaccagttgaatcaataacccgtttattaaatttgaagcctttaatttcaattggacgactaccagtagcaatgattaaatttttaaaactgtacgtttgtgcactctcttctttaatcacgcgtaagctatgttcgtccactaaaaaggctgaaccgtctaacacatcaatcttgtgttttttgaacaacattgaaatgccaccagttagtttttcaacaacctcatgttgtttccagtcttgcgttttcgcaaaatccaatgttgctccagtagtcgtcacaccaaagacagatgaatctttcgcctcttgtagtcgatgaccagctgaaatcaaagccttggaaggaatacagccgacgtttaaacaaacaccgccaattgtttcacgttcaatcacagttactttttgacccatttcggccgcgcgaattgccgcaacatagcccccaggacctgaaccgatgactactgtgtctaattcaattgcaaaatcacctacaaccattttaaaatcatccttccatcaataatagctctggatcagctaataattcttttaattcgttcatcgcacgttgcgcagttccaccatcaattaaacgatgatcaaatgatagtgataatttcaagactttgccaacagccaactcaccatcagcgttgacgattggttctgtcccaattcggccaacccctaagattgcaacttcagggtagttaacaaccggtgtaaaccaaccgccaccaattgatccgatattactgattgtcattgaaccaccactcatttcagctggtttcaatttgttatccaatgctttttgcgtattttcgccaatttctttagcgatggcaaaaatactcttgctgtcggcatccttgatatttgggacatagagcccgtgatcagtatccgttgcaattccgacattaatgtagtgtttataaacaatttcgttagttgcatcatcaattgacgcgttcaaagttgggaagtcacgtaagaccgttaccaaagctttaacgatgtatggtaagaaggttaacttaatgtccttcttagccgctacatccttgaatttcttacgatgggtcatcaatttagaaacttccacttcatcgaataaagtaacgtgtggtgccgtatgcttgcttgtcaccattgctttagcaattgctttccgcgttggtgacattttttcacgtgtttcccgttctggtgtaacagaggtgtatggtgtcgcagcaactggttgtgcaactggtgttgctggcgacgttggttgttctgctgtctctacagcaggtgctgtcgttgttgcagcgccattttgcatgaagatttgcacgtcttctttagtaatccgaccatgtttaccggtggctggcacttgactgatatcaacatcgttttcacgtgcgaattttcgaacagatggcatagctaaaatcgtccgattttggtcactaatcgcaactactgcttgactgcttggcgccgttgttttagctggtgttgattctgacgccgtagctggtgcttgttcagcagatgttgccgttgccgaattgtgacctggagcatcaatttcgaccaatacttgaccgacagtcgccacttcgccttcaccgactaaaattttaacgactttcccactaacaggtgatgggatttcttcaactgatttatcattttgaacttctaataaagtgtcatcttcttgaatggtatcgccttctgcgaccgcccatttttgaatttcaccttcggcaatcccttcaccaatatctggtaatttaaattggtaaacaccacctgcatcggttgcagtcggtgctgcttcgggtgtagcagctggtgttgccgtacttggtgtatcgttaccttcaacacctggtgcgtcaatttcaaccagtacttggccaactgttgccacttcaccctcaccgactaaaattttaacgactttcccactaacgggtgatgggatttcttcaactgatttatcattttgaacttcaagtaagacatcatcttcttgaatcgtgtcaccttctgcgactgcccatttttgaatttcgccttctgcgatcccttcaccaatatccggtaatttaaattgatatgccatacgtctaacgtcccttctttcgttatcgactaaaagttaataacttctttaaccttattttcaatatcagttgcatttggtaaccaagttgcttcagcttgtccaaatgggaatggcgtatcaggagctgaaacacgtgcaattggagcttccaatgaaagaacagcacgttctgaaatttcagaagcaacttgtgccccaacgcctgcttgtttttgtgcttcttgaacaataacgacccgccctgttttttcgacagaggcgataattgttgcaacatctaatggtgcaattgttcgtaaatcaattacttcagctttaatattctctttagctaggttttcggccgctttaatcgcttctctcaccattgcaccgtaagtgatgattgaaacatctgtcccttcagtaaccacagctgctttatcaagcggcactgtataagattcatcaggtacttcttcgcggaacgaccggtataatttcatgtgttcaagatacaaaacaggatcgtttgaacgaatcgcagaaatcaataagcctttggcatcatatggattacttggcacaaccacgcgaatccctggaatttgcgtgatcattccttcaaagttatctgaatgtaattctggggtatgcacgccaccaccaaatggtgcacgaatcgtgattggcatgttgcgtgtgccacccatccgataacgtgtccgtgacatctggccagcaatcgaatccattgtttcgaaaacgaaaccaaagaattgaatttcaggtacagggcggaagccttctagtgctaaaccgattgataaaccaccaatcccagattcagctaacggtgtatcaaaaacgcggtcttcaccatgtttagcttgcaacccttcagttgctcggaaaaccccaccgttcttcccaacatcttccccgaaaatcaagacgttcttatcatctgcaagttctaaatccagcgcatttgtaattgcttgaatcatcgttttttgtgccatcttaattcgactcctttgcactgtactctgcgatttgttctttaatgttttgtggttggtcttcaaatgtaacattcaagaaatctgtgactttttgttttggcgcagcatccgcttcgttgatggctgctttaatgtctgttttaacttgttcgatcaattggtcttcttgatcttgtgaccaaagtcccttatcagttaagaaacgacgcattctaacgagtggatcacgtttcaaccaaatatcgtctgtttctttggtccgataacgagtcggatcatcccctgataatgtatgtggtccataacgataggttaatgtttcaattaagaccggtccgttgccagcagttgtaaattcacgcgcttctttcatcacttcataaactgctagtggatccatcccatcgacttgaatggcaggaatcccagctgcgacccctttttgagccaacgttacagcagctgtttgtttttcacgtgggaccgaaatcgcaaagccgttattttgaacaacgaaaatggctggtgctttaaaagcacccgcaaagttcaagccttcatagaaatccccctgtgaagtcccaccgtcaccggtataaacgtaaacagcattttctgattggcgcttcttcatcccaaccgcaacacccattgcttgaatgtattgcgcgccgataatgatttgtggtggcatcgccttcaaagattctggatacttgttaccgtcaatatggcctcgtgaccataggaatgcttgtgataaaggtagcccatgttgcactaattgtggcacatcccggtaaccagggaataaaaagtcgtctttagtcatcgcaaagttacttgctaattggctggcttcttgcccagcagttggtgcataaaatcctaaccggccttgacggttcaaagcagttgctcgttgatcaagcacacgcgaccaaaccatttgtttcatcagttcaaccaattggtcatcactgagatccggcatcaattccggattaacaacctggccagtctcatctaaaatttgaacggtcttaaaatcttggctctcatcgctcaataacttttcaaaattaactgcagctttattattgaccatagtatccatatctcctctttaaaaaactgttttaatgactgcttatatctgtattacttaagcatctttacaagactaatttagcatttcacatcactaaatgcaagcgttttataagctatattagtcagtttacgctttcattagtttttattacatgtgaatctaatcactagttagctaattttcacgtctgttctatatctgttataatttaatttcgttttctgttatataatagcaaataataggcacaaaaaaagagtccgccgtagcagactcatcgttaaatttaagttggggtagttctatgccaagaccggttggggtatctcagcgttgccagcatgcactaagagctcttgaaacactctgactactggtttaatttgttgactgacttgcacgcaccgttcacttacccgcaaatcatttaaatcaatcgcaaccttaatttgaccaaggttgactaacttaatcattgtcagcaggattgccccgacaaccaacgttgccaagcccatgaaagcgaattgattaaccattaatactgcacaaaacgaaaccaatgcagctaccgccatcataaaagtgcttcccactctaactttaggtgtttgtgctttagcaccaatcgttgcatctagcacaacgccgtgcaccatttcagtcactgcttcgcccgcttcaataacgttaacatctttgttaactgttgcgattgtaacgggtgtcttttcgctagcagccaatactaaaatatcaccgggcacaatttgatctgcaccgattaagcgtaaaaaaccatcacgcataacgctaacccgtgcttgtgaattttctaatactgcttctcttttagcagcttcgacagttgttaagccacttggccgagttgccaataaacgcattaacatcccactgcttgtaatgccagtgatgttaacgtctttttttaatttcttgtgcatcgcgttcgacactccttcccttttgaggaagtcgtcgtaaaccgctagcctaatgctggcagtaaaatgacagaccacctcgaatgatcaccatcgctactacttacaggtccttcagctgttttcatcattttactcaccagactttctctactttaaatttagtcataccgctttatccgacaaaaaaagacgcacaacaattgagcgtcatccatttatcatggcgttcccaatcgttcagttttagcactatatgacgtagaaaccatgttcagctacgttagaaaaagccttcattggcagtttcagttgactcaattggcatctctcgatgtttctgagtagcagcgtttgttcatataggagcctcacctaacggaaaagcaatatatctatactcttatactacccgtttcactttagcaggtcaagcaattcattccgttttaacttgaattgtgctagaataatgaatgacgaattaatcggaggtcttaactgtgatattaatgaaagatattatccgcgagggtaacccaacacttagaaaaatagctgaacctgttacttttccgctatcagatgaagatcggcaacttgccgctgacatgatggcatttttagaaaatagccaggatcctgaacttgctgaaaagtaccacttgcgcgctggcgtcggtttagctgcaccccaagtagatgtttcaaaacaaatgtctgctgtcttggtccctggaccagacgaacccatcttcaaagatgtgattatcaaccctaaaattatcagccactctgttcaaaacgcagcacttgctgaaggtgaaggttgcttatcagttgaccgcgaagtgcccggctttgtgccccgccctgaccgtattacactacgttaccaagatttagacggtgaaagccacaagattcgcttaaaaaactacccagctattgtgtgccaacacgaaatcgatcatctaaatggcatcttgttcttcgatcacatcaacaagcaagacccattcgcagcaccagatgacatgattattattgaatagaagtgcgattggttgtgcttagcaactgagcattaatacagaattggcagttatcccgaattgtgggataactgccaattttagattaaacgggagttgttgcacccaagcgcacgttaaagaagaagtgctgattcgagttggtcaggctttgaggcttaacggtaaaggctactcgagaagcacataaaaaagcgtgattgaaatctcattagaagatttcgatcatgctttttttatgcttccgccgcttcaggcgtatcggcaaattgactgttatataaattagcgtacacaccgccggcagctaatagcgaatcgtgcgtcccttgttcaacaatttgaccatggtccatcactaaaatcaaatccgcgtcgcgaatcgttgagagtcgatgggcaatgacgaaactcgttcgcccttgcatgactttttccatggctttttgcaataaaccttctaatcgggtatccaccgaactagttgcttcgtccaagattaaaatcttaggatccgcaatcacggctcgggcaatcgtcaatagttgtttttgcccaagcgaaacgttgcttgcttcttcatcaatcgtcatttgatagccgtttggcaacgtatggataaaatgatcgacattagcggttttagccgcatcaacgacttcatactctgtcgcatcgagtttcccgaaacgaatattatcggtgattgaagcatgatataaccaagcatcttgaagtaccatcccaaattgggaacggacttgttgcttgcttaattgcttcgtgtcaaccccatcaatccgaatcgttccagatgtcacatcataaaaacgcatcaacaagttaatcatcgttgtcttcccagcaccggttggcccgacaatcgccactttatcacctgggttagcagtaaagctcaaatggcgaatcaatggtttgtctgggttatagctgaaactgacatcatcaaattcaactttaccttgaacgattgctggcaacgatgctgtttcattatcggttgcttcaactggctcatctaagatttcaaatacacgaccagttgcagcagcagctgattgaatcacaccagacaactgtgtaatctgtgagattggttggttcacttgccaaatatattgaatgaaggcttgtaaattaccaactgaaatcacaccgtgcaagacataataaccacctaacgttgccatcccggcatacgtcatgtttgtcgttaaaccaactaacggcatcatcaagccagaaacaaaggctgccttaaagccatagtcagttaaccgatccgtaatttctgcaaaagcagcaattgcgcgttcttcttgtccgtaaagtttcaagacactgaagccgccataattttcctgtacaaagccgttcatttcgcccaacgtgtcttgttgtcctctaaagtacggctgcgatttctgaatgacccgtcttgaaatcaataacgatgctggaatcattattaatgataagagcgccatccaaatattaatcgtaatcatcatgatcacggccgtgatgatccctaagatcgatgtcacaacttgaattaaactctgttgtaaagcgttcgtaatcgcgtccacatcgttggttacccgtgacaagatattcccttgttgttgtgaatcaaaaaaacgaacgggtagcgcattgatttgcaaatcaatgtcgcgccgtaaatcacgcatcgcccgttgaacagcccgcgtcatccaaaacgagcctaaaaacatcgtcacttgatatagcaacgcaaagctcaaaatcatcgcaatcaccttcgcgatataactaaaattaatcgcaacgtgttgtgctaaattccgactgatttcagtaatggctagtcccatgatcactggccacagtgcattagcgagcaccgaaataacagttgcggtaatcgcaagccaaaatgtcacttgatacggcccaatgtagcgcattagccgtttaagttctctaatattcttcattgagttcctcctgtgataactgtgatgccgcaatcgcacgataaatctcgttatcttttaataagtcgcggtgagtcccaataccaaccacttgaccttcgtttaagacgacaatccgatcagcattcatgatagtcccaactcgttgtgccacaatcagcactgttgcctctttggtgattgacttcaatgcacctcgtaacgccgcatccgttttataatccaatgctgaaaaactatcatcaaagatataaagcgcggggcggcggacaatcgctctggcaatcgccaaacgttgcttttgaccaccagataaattgctcccaccttcggctaaataagtttgtaagccgtctggtttttcagcgacaaaggtatctgattgtgcaattttcaaagctgtccataattcttcatcagtcgcattcggattaccataacgcaagttttccgcgattgttccggtaaataacaccgctttttgtggaataaaaccgatcttttggcgcaacgccttaagttgatagtcgcgcacatcatgaccgtcaagcttaatcgatccacgtgttacgtcaaaaaagcgtggaatcaattgaatcaacgttgacttaccactcccggtactcccaataaaggcaaccgtttcacccggatgcgcttggaacgtcacatcccgaacgaccggactttcagtcggacctggataagcaaaggagacattatcaaacaccaattcaccttgtgtgtcggttgttgttaccccgtcttctttttcggtaatattaattggcgcattcagaattttttcaattcgttctgctgaaacagcggcccgtggatacatcatgaagacactggcaaataacataaatgaaaacagtacgtggaaaatatattcaataaacgcaatcaacgtcccaaccgctaagtgaccaccatcaatctgaacagccccttgccaaatgattagaacgaatacgatattaaagatgaacgaaaagcccggttgtgctaaagccaccaacgtaaacagccggatagaactatgactgtagtcatcattcacttttctaaagcgtaatttctggaattgttcccgcacaaaagcacggacaacacgaatcccagtcaagttctcacgcagattcagattaatcgcatccagatttttttgttgttccgtcgacatcggttcagaaacgcgaccaatcaagacaacccccgttagcaggattggaattgccgcaaatacaatccatgagagcgattgacttgtccgtacaatcatgaaagcactcgcgacgatcatcatcggggtcataaaccctgtccgcaacacttgggtcataaattgcatcacctggaaagcatcattagtggtccgagtaatcaaagaagacacaccaaattcgccatactcactatgggaaaactgcatggtttgtttaaaaatatcgttacgaatgtcacggacgatattggtggttaatttgctaccagtataagccaagccaattaagccaattagtccgattaaacagattccaaccatcaataacccaaattgccacacaggaccaaaggtatgttgattaattcctttatcaataatttgtcctaataacgttggtaatcccaattcgattagaataaatccaaatacacaaataaagttccaaaatagtaatttcttatatcggatcgtatagcgccacattaatttcatcggtgcaaactccttctaaacttcaaatttaatcttctacctgtgccatatctttaacatactcgattgtttcgcgattgacaataaaagcaacgtcaaaatgcaattgtttttccaaaaaccacacatcagtgactagcaaagccggataacgcggactgacggaggcaatccgccgttcgtaagccacttcattgagttgttcctcaattgcggctgccacatcctttaatgcagatgatgtttgtcggatgggcacttggtattcgaagaccatcacattattgccccaaatttcagtgggcaggttcgaaaccagtttggcttgcggtgcataaaaatccggctgactcgcttgcattttttgataagccaccgttgcaatttcatccgcaatttcttgactactgtgttgtaaaatccgcgtcgctctttgtcggcgtaaccgtttaatcaaccaggttaaaaaaagcgctaacgcgacaatgataacgactgacaaccaaattaacataacaatcccccacttctattgctcactaatatgataattataaccgaatcgaggcaaacacgctatttagagcacgtcgctcaatgtatactttaccgaaaagatatgctaaaatattcttaaatgttgagtaatcaacccctggacggttaatctttcgtttaaaactatgatgaataataaaggagttttacaattgatttataaagtacttttccaagcagacaaaacccaaagccctctacgcgaggcaactaaatcgatctatttagaagcagacagtgccgttgaagcacgccaacttgttgaagacaatactccctacaatattgaatttgtacaagaattatctggtaagcaccttgcttttgaacaagaatcagaagattttaaattaacggagttttaattaaatgaaactcgatattaagaataacgaaaccgccgttttcgccgtagggggacttggtgaaatcggtaaaaatatgtatggtgttcaattccaagacgaaattattgtgattgatgccggcattaaattccccgaagatgaactcttagggatcgattatgttatttcagactatcaataccttcaaaaaaatcaacaaaagatcaaagccctcgtcattacccatgggcatgaagatcacattggtggtttaccttacttcttgcaacaagtccctaatgtacccgtctacgctggtccattggcacttgccttgattcgcggtaagttagaagaacacggccttttgcggtcaacagaattacacgaactaaacgaagataccgtccttaaattccgcaaaacaagtgttgatttcttccggactacccattcaattcctgatactttaggggttgcgattcatacacctcaaggggtaatcgttgaaactggggatttcaagtttgacttgaccccggttggtaatcaaccttcccctaatcttcaaaaaatggcacgtttaggtgaagaaggcgttttatgtttaatgtctgatagtaccaatgccgaagtaccaaactttacaaagtcagaacgtttcgtcggcacttcaatccgccatattgtggaacgcattgaaggtcgcattattttcgcaacgtttgcttctaatatttcacgggtctcacaagccactgatgctgcgattgctaacggtcgtaaaattgccgtctttggtcgcagtatggaagcagcggttgtcaacggtcgtgaactcggttatttaaatattcccgatgaagctttagttgatgccaatgaattaaattcgttgcccgccgacaaagtgatgattctatgtacaggatctcaaggtgaaccaatggctgctctaagccggatcgccaatgggactcaccgtcaaatttcaattcaacctggcgacaccgttgttttctcaagtaatccaattcctgggaatacaatgagcgttaaccacgtgattaataagctttcagaagctggtgctgaagttattcacggtaaagtgaataacattcatacgtcaggtcacggtggtcaagaagaacaaaaattaatgctccggttaatcaaaccgaagtacttcatgccttgccatggtgaataccggatgcaaaaaatccatacggaactcgctcaacaatgtggtgtggaacctgataactgcttcatccttgaaaacggtgacgtcttagcactcacttctgactcagcacgggttgctggtcactttagcgccgaagacgtttacgttgatggcaacggaattggcgatattggcaatgtcgtgctccgcgatcgtaaaatgctctcagaagaaggtttggttgttgttgtggcaactatcaatcttggtgaaaagaacattctcgctggtccagatatcctctcccgtggtttcgtctacatgcgtgaatcaggtgaattgattagcgaagcccaacgccgagttttccgaatgatcgtcaatacgtttaacgctaacgacaaggtcactgaaaaccaagtccgcgaagcaatcattgatggcttacaagacttcttgtttgaaaaaacagaacgccgcccaatgattttaccaatgatcattcaaagtacagaataataagttttgcgccaggtcaatatatgacctggcgctttttttattgtttaatgcaagtttttattgtcaacatttggtaaaaaccgctataatatacaacagattactttttctgaaaggcggcttgttcatgccctccaatccccatttttacatcattttaaaccaagttgccggtaccggtcaggcagcgagtatctggcctaaaattgaaactcaattaaaacaaaaacaaattcactatgaccttcaactctcccactacgcaggtcacacgacccaattggccttccaatttgcaaagtttaagtacacggatcaaattttattaattattggtggagacggcacgctcaatcaagccatcaatggtctccagaatgctcagcgcggcgatattccgattgcttacattccttgtggatcgggtaatgacttcgcccgtggtgtcgggattagtcgtgatccattgaccgcactcgaacaaatcttgtcggccacaatgccaactgccatcgatttaggttattatcatgacacaacgaagaacgaccatggctacttcgttaacaatgtggggattggttttgatgccaacgtggtcagcaccaccaatcattcaaatcataaacgacttttaaatcgattgcacttaggctcattagcttacatcagctcattggttaaagtttttatgcaccaagatgcgtttgaagtcaccgtcacggctgatcaccaaaatcattattttaaacgtggctttttagtgaccaccactaaccatccctactttggcggaggggtccccatcatgcctagcgcaacggtcgacaaccatcaacttgatttaattgtgattgaaaaattgaatccctttttcttttgctatctttttgtgatgatgctgtttggtcggcacacacgctatcaagcggtgcatcactttgaaggaaccaacttagcgattcaaacaaaaacattagaattcgggcaaatggacggtgaagaacttggtagccggacatttgatattcactatagtcttaaaagccaggcattttggctaaagaagcaagcataaataaataaaaggcgctgcctccaagttgggggcagcgccttttaacgtgctcttcaaatcatgttcctatgcctagcaacacaaggctagtgcacaaaagttgaccaaacttgaatgcactcatttctttagaagtaatccgagaagtatggttggtccattggaataatattctcgagattttttagtgcttgtcggttggcttgtagtctttcaatctttgccaagtatgatgggcgtcgatagctcatcagcattgttgttagtgtctggatgtcgcattgaattcgttcaccgactgggcgacttgtgacctgcacttttccttgttcatcccaataaacgccaaacgtaccgttattccattcagctaatggatcggtcaattcaatgtggaatgcttgcccgtccgtttcaaacggataagccaacaagaattcacgcacatcaacaatccgcgccataaaatatggcttaatcgtctggtcaatatcaccatcttctaataagaatgaaatcggttcatcctgatattgattacccttgacatgttcaatcattgaataatgcgcgccaatgaagttccacagaccaatccgggcttcttgattaagataaatcatttctttaatatggaagacttcgttggcaatccagtataaaacatagccggtgggttgttcattttcatcataataaacaccagcaatccgttcttcttcattttcccaacgccaatattcatcccagttcagttcgttacgaatcattgcaccgtgattttttagtgcaaaccgttgatacgttttaatcacgtcttcatcgtcaatatcaaggcgttcaacgtgcccatttaccggccgttgcttaggtaattggctatcacgaatatcataagttaggtgatcagacatgatctcccaccctttcttacgataaaacggaatgctgtatggatataaatacgatatccactgcttattctcacgcatcttgttcaagccgactttaaccaagtcatgcatcaaaccatgaccggcatattccgggtaagtcccgacaccagtcaaaccacccatgttaaatacctggccatgaatgttcacgcggcaatgatagatggctaattgtgaaatcagttcgtccccattaaaccatccgattacgtcagatttttctaatacgggacgtttggcgcgttctaattcgccctcttcgtagccactatcagaaacttcctgatcggtgacttgaaaaacataccgtaataagtcattaaattgttctaaatgttcaattgtcacgggtctaatctctaaattagatcgctggtcaaccattgtttcgcctcatttttcgttagttgtttaccctattatacactattttgatttcggcataaaatcgtacggtgtcaccccggtcatcccaatcattggatccacttgctgttgcgttagaacagtcggtgttaagacataactgattggcgtttcttgtattgcgtcgtcgtcttctggcactaagttcagttgttcatcaacagccgtttctggcgcacttggtggtgccggctggtcaacaattattttggcttctgtctgccccacactggccgtcttaatggcggtgctgagttgttcaccgttaaagacactttgaatccgttcttttaacgtcgtttgccgattggccgaaagttcctgagctgctttttggaaagcactcggttcaccaatcagaatcaacaatgatttagcccgcgtgactgctgtgtacagtaagtttcgcttgagcattcgttggtattgattgaccaatggtagaatcaccatttcaaattcagaaccttgcgccttatgaatcgacgtacagtaagccaatgtaatcttgtgccactcactccgcttataggtcacttctgcactatcaaaagcaatggtgatctcgtcaaccttgtccgcactctttttagcataggtaatccccgtaatctgcccgatttcaccattaaacacattttgttccggactattgaccagatggagtactttatcgccaatgcggtagtgaacgttaccaatgctaacttgttttttgcggtcatctagctttggattcatgatattttgaatcatcgggtttaactgatcaattccggctgctcctttgtacatcggcgctagcacttgaatgtccttagtttcaaaaccacgcgctttggccttagtaacgacttgttcaatcaccgattcaatttgatacggattacattgaatgaaactgcggtctttttgcggcttcaacaaatccgctggcagttggccttgattaatttcatgcgccaacggaataatcgttgactggtcatcttgccgataaatacgttgtaattcaaccgctggaataaccttactctgcaataaatcaaagaaaacttgccctgccccgacggatggtaattgatccttatccccaaccaatacaacctgcatatgactgggcaccgcccgtagtaatgagcgaaacaagtaagtatcgaccatcgacatttcatcaataatcaataggccgccttccaattctttgttaccggaaacatctggattattttcgcggccagtgattccgagtaagcgatgaattgtactagcaggcaaacccgttgtttcactcattcgttttgcggcccgacctgttggagcggccaataaaatcggaaacggcgtgtctttgtactcattaatatctaatgacagcccgtttaattcagcgtataatgtcacgattccgttaataatcgtcgttttcccagtaccaggtcctccggttaataagaacgcccggtgagtcatcgcaagcttaatcgcctcttgttgtacgtcatcgtatgtcatcttaaaccgtttttcgaggtggcgaatttcttgatctagatcatgtttaggatagctaagttgatcgcgttcattttcaattcgcattaaatggttcgcaatttgccactccgcattaaataacccattcggataaatccgattctcatcaccaacgactttcccatcatgtgcaagtgccatcagttgttcagccaccaagttcggatcaatagcaacattgcgtgctttttccatcaactcaatactagctgccaataacggcttggcctgggtataggtatccccagcttgattggtcaactcatttaacgcttgcattaaagccccttgcacccgcacggctgaatcagcggcaaacccgagggtctccgctaaattatctgcacgtttaaagccaatcccagcaatgtcagccacgagttggtacggattttcttggataatcttcagcgtatcttcatggtaggtctgatagatgttataggccatcgagctcccaaaaccatagttgtttaagccaataataatctgttccatcccattattaatcgtcagcgtttcaacgagttgtgcttgtttcttcgcatttagccccaatggttctaacgccgtcggatcctctaatattttatcaatcgcgtcaattccaagagtatccacgattttttcggccgttttctgcccaatgcctgtgaatttttcgccagacaaataagcgactaagccggccttagtcgttggttggtccacttggtaattatcggcttgaaactgtttgccatatttaggatgagtgaccactttgccatagaaggtatatcgttcatcttctttaatgtcgccaaaactcccggtcaccacaatttctgtttcgtgccagtcaatcgtcttatgtgctactttaacgagtagaattttaaaaaaattatccgggctctcatagaaaatactctggacggttccggtgactgttggtttggtttcgtctgtttttgctatatccacaatcgccatcccttattctttttgctctttagcctgcatgaagccttcaatatcaattaactgttgtttattctttttaaaataatccggtgcatagtgcttggcttgttcgaaataaggctcactatcagcgcctaagaccagttgcgtcaagccatacttaaataatacttcaccattttgaggtgcaatggtcaatgcctttttaaggtaggtctgcgcttggtcaaaatcacccaagctcgttaaaatatcgcccactaaaagattggcgtctagttggtctggttcttgttcttgaacggtcaacgcgaacgccaatgcccgtggattctgttcgagttgatgatatgtctgcgcaagcatatactgcgcatctgttgattgtgagtcttgcaccaactgcatgaacaagggcaccgcttgttgataagcttccgcttgataatagagtgttcctaatgcgtaagtcaatgcagcttcattatgaaattgcgtcaacgctttttgcaaaagtgcttcagcttgttcaaaatctttaagcgtcgttaaaaatgtcgcaagggtaacgtaagcttcaatgtcttctgagtgatcttgtaaatattgtacgagatctttaacagcggcttcgtggtcgccagcggcccattttgctagaattgcttgcacgtgatcatctcctatatcgtatctgttgcggataattgcttgctgaggaagtgtgtatcattccacttaattagtttgaaagatgctccttgatcgtcagttgtcatcgtggtcacagatgaatttgtcacaccgccgtctttgcggacctgagccaatggtgtcttgagtaaggactgcatcatcgccaccatcgctgccccatggctgacaataataatatgatcagtcggtttagcagccttcacaatcgcgtcaattgcttgcgttgtccgttcaatcacttgttcaaaggtttcccctttaatttcagttggatcatactccgctggtgcttcacgaaaggccttcacgattgtcggatattgtttttcgacttccgtaaagcgcatcccttccattagaccgagattaaattcgtggagtgcatcaacaaccgtaatcggaaaatcctgccctaagtctcgttttagcgccgcagacgttacctgtgtgcgttttaacggactcgtatataaatgatcaaaatgaatgggctttaaaaatgtggctaattcttcaatttcaacgtaactactgtctaataatggtgaatcaccacgtgcaccttgatagcggccttccaaattccattcagtcttaccgtggcggataaaatataaggttgtcatgcgttctctccttaaaataacttacttttcattatgaaagagttacgccctaaattcaagtcaatcgactaataaagcaagcatttttcctgtaaaacgccatcaaaaaaaccgctaggataaaaatactttttatcctagcggtttcatctattagttgctctaaacgtgtttcagtaggcatatttctgcggttaaccctatttgccaaatccagttaatcctcaaaatatgaacgcttacttacacactcttttatttactttctgcgacagcttgcattgcaattgcgttgacgtagttgactggttgatcgtagtttggttggaagaacatgtcaaccattgctaattgatcaatcgtcatcttcgtttgaatggccattgaaatgacgttcgctgcttgagcaatatcatacatacttgtgaatgaaccacccaatacttgacgcgtcttaggatcccacattaagttcatcaaaaccggtgtcgttgatggcatgaaatcagggcggtaatcttgttctaacgttgttgtagcgacttcaatcccacgcactttcgcgccttcaactgttaggccactccctgaataggtgcgaccaaataattcaacggcagaagttgcttgcgtgcccatgtacttttcagttggtgtttcgatgttgcggccgattaaaaggccttggcgaacagcgttggttgccaatggaatgtaatctgctttttgtgttggattgtaatgaacagctgctgaatcgccggctgcataaacatccttaacagacgtttgcatgtattcatccgtcaaaatcgcaccgttacctaacatatcaacttgccctttgaaaaggccagtatttgggcggaagccaacacataaaattgcaatgtcggctgtgtattcgttcttatcagttttaacagtgacttgatccgtccctgagaaactgaccactttttcgctaagcgcgagggttacaccgtggtcacggtaatcttgttccacgatttctgagatattaggatcgaaattcttgccgagtgcgtgtggtaatgcatcgattaatgtcacttgcttatcagttgttgcataggcttctgccaattcggcaccgatgtaacctgaaccaatcacgataacactcttcacatctggggcgctcttcttcaattcattggcatgcgcccagtttttgcagagcttaacgttcggattgtcaatgccttcaattggtggaatcacaggtgatgagcctgttgtgacgatgattttatcaaatttttcggttgtttcttcttccgttactaggttcttaacgcgtaatattttttgatctaagtcagcttctaaaacagtgtgttgcatcttcatgtgagcgcccgcttgcgctaacatttctggatttgaatagaacattttctgaggatcggctacatggccgcccacccaaagggcaatcccgcatgataagaatgataaattatcgtgtgtttcataaaccgttacatcccaatcaggatgttctgccaatgttgcttgtgttgcaaatgtccctgcgtgtgtacaaccaataactgctactttcatcatgttacctcctagaaatatccaaaaaacgacggttaatcgttgagaatttgtgaaatattacgcaaccagcatgtaactatattgtacgctacttagtttcggaaagtcaattgcctccagctattaaattaatttcacaatctaaaacgaataaccacttatgttttaaacgttatattgtgattttattctaaaaaaggtcgttgaccacttattgaacaaacccacaaaaaaagtgctgataaatataaattcatcagcacttttaacgattaaattagatatattgtaatactttcatgtcagcatcatcgttcgcagccttataagccacgtcaatcgtgccgccacctaaacattctgcgccgtcataaaagacaaccgcttgaccaggagtaatcgcacgcactggatcatcaaagacaaccgttgcagttgtgtcagatgtcatgtggacggttacgccgacgtcttgttgacggtaacggaacttagccgtcacgtggaaatctgtcccatgatcaactggtgtgatccaagaaatattacttgcatctaattgatcagcatagagtaattcattatggtagccttgaccaacatataaaatgtttttgtctaaatctttaccaacaacgaaccatggatcattggattcgccaccgccaccgattccaagaccggagcgttgaccaatcgtgtagtacattagaccgtcatgggtgcctttttcaagaccgtcgaccgtcatcatcttaccgggttgtgctggtaagtattcgcctaagaattgcttgaagttccgttcaccgatgaaacaaatcccggttgagtccttcttcttagcagttgctaagccagcctcttcagctaaccgacgcacttctgctttttgcatgtgaccgattgggaacattgatttttgtaattgatcttgagaaagagcgctcaagaaataagtttgatctttattgctatcaccgccacgcaacatgtgcgcgatgccgttatcatcgcgttcaatctgagcatagtggcccattgcgatgaagtcagcgtctaattccattgcgtaatctaagaaagccttgaatttcacttctttgttacacatgacgtctggattaggcgttctgccgtgtttgtattcgtctaagaaatattcgaacacgcggtcccaatattctttttcgaagttgacggaataataaggaatgccaattttagaagcaaccttggcaacatcctcataatcttccgttgcggtacagacaccattttcatctgtatcgtcccaatttttcatgaaaacaccaatcacatcgtatccttgttgctttaacaacaatgctgtgacagatgaatccaccccgccgctcataccaacgacgactcgtgtattactgtggtcaaccacaatatcaccatcatttcaaatagattctagttttctacgatttgaaggtcgtgaattccagtacttaacattatagcaatcttggttaatatttcaaactaaaacactcacttttcataagttaaacgtaaaaaaagcagtttacctatcaaactcctggtaaaccgctcttaaaacgttatttagccttctttaattaacacttcacgtgccactaagttagcaataataaaattaaattgttcgacgttttcagcattcttttcactcttgaaaatatcgactggatgtaagccatctggagaggtgacagacatcttcaacgtctgtaactctttaccaattgtcatcttcaacttaatcgcactgttaaatggtgaattaggatctaatggccgttccatctggaagttaccattgtttgtgggcacaaagccaacatctcttaatgtgtattttttaacggcgggattgagtcgatattgcaccgtactccccaaaaccgttgctgttgtttttaataaagccatctgcctaacctccatacactgaataagtctattttagcacaagcacgtaaacgctgcctaccccttagcggcttgctttgctaaattgcgtttcacaatcttcgtgagcgcttcggcaaaagcagcgacgtcttcgctcgatgtttcgtgaccaaaactaatccggatgctttcggcaacgcgcgggctatcctcaccatacatcgcgatcaacacgtgtgagggttccaaatcgccagcagtacatgccgaaccacctgaaattgcaaagcctgctaaatcaagattcatctgcaagacataggttgaaacacctttaatccagaggttcacaacatgcccgacttgatcagctccttctgcgttcagcgcaaaatcaatgtcgttggcttttaaatcagctagtaattgctgtttgaatccagcataccgtgcttgtaggtctgctttaaccgctggggccaataattcaactgctttcgcaaaaccagctacagcgggcacattttcagtccctgcgcggcgcttcttttcttgttcgccacctaggacaaatgatggtaaatgaatcgcgtcgttgacatagaggaagccgatttgcttaggtccattgatcttgtgggctgaaactgccagtaaatcgatattgtcagcttgcacatcgatatctaataagccatacgtttgcgtagcatctgtgtggaaccaggcgtttgagtcgcggacaagttcaccaatttcgtgaattggcatatgactgccgacttcgttattgcccatcataatcgatactagaatcgtttcgggcgttaaagccgccttcaaatctgcgagatcaatcaccccttgttcgttgacgggtaagtaaatcacatcaaacccttgcatttctaaataggccatcggttttaaaacggaatgatgttcaattgccgttgtaataatccgcttgccttctttagcacgcagtttggctgtctgaaggattgccgtgttattactttcggttgccccactcgttaagataagctcgttatctttcgcatgaatgctctgtgccaaagtatggcggctggtatccaacaccgtgtgggcttggcgcccaaaataatgggtgctcgatgcattcccgaaatcggcctgcatctgttcggtcatcgtcgcaatgacttctggggccatgggtgtcgttgccgcgttatctaaataaatatgtttcacaatttttcgcctcattttaaaaagtatctataatagtttaacatagttcgcttttaaagcacggataaacacttttcgctaccaaaaaaggctgggacaaagataccttgtcccagcctttaaaacacttaatctcagattaagcagtcattaaagctgctttttgatctgctgttaatgattcattcatccggccactcttgaaaccagctaaatcaaccgttacaaattcaaaaccagcttgttgtaatgcttggttgatttgttcgctgtgggttaagaagtcagcaatttgtgcttctgggacttcaacccgggcgattgattcgtggtaacgaacacgaaccgttgcaaaacctaaatcacgcaagaatttttcagattgcatcacttgagcaattttggcttcagttaaggctgtgttatatggaaagcgtgaagaaactgaacagctcgctactttattccagttatttaagtttaatgtctttgctaattgacggacatcaatcttataaaaaccagctgtttgaaggacactttctgcgccagcttcgtcacgggcccgtaaacctggacggaagtcgctgttatcatccatgatcatcccatctaaaacgtggtcaaagcctttttcagcagcaatttggttcaattgtgtatagaacatcttcttgctgtaataccatgtttctggtgtgttgttggcaatgtgttcgtcagataagtagttcaatgttgttgtttcgacattcgcgcccatatcatgtgccaagtcgatggctttgttaaattcttcgtctgtgaataattctgagttagcaacgactgctaagacgttttctttgccgagtgtttctaaagccatttttaaaactaatgtgctatcaatcccaccagaaaaggcaacaatcactttttccatttgttgtaaactgacagttaacattgcttttttttcagataatgtattcattgttaaagacttctttctatatcattagattaattgttttaaagctgttaattcattttgaatccgatcggcatacaccaaatcgttgttatctaaactcttgacgatcatcaagtttaaatgcgcggcactatcaacaaagtttttgaaagttgattgactagcggtttgttgcgcgtcatcaaggctaccataaagttgttctgctgttaaaagcgcttgttgcgcttcaattaaactggttgagattgtccccggttgtgaggcatgagcagcgacttcgaataagtcgaccatcatgttttgcgtttgtttaatttgttcacgcatggttgattcctccgattaaattagatgccaaagaaactccgcataaagagtgcggcacatagaccaccaacaaatggtgcaattccgggcacgataatcccgtattgccaatctgagttggctttatttttaattggtaaaagcgcgtgagcaattctaggacccatatcacgcgcaaggttcattgcgaatccggtaggaccgcccatccccatcccaattgcccaaacaagtaacccaactgcgattggtgcaatcccaggtgtcttgatttgtgtaatggcgataattgatgaaatgaaaacaaatgttgcgaaaaattcaacgaagaagttccgtggtaaattccggataccaggtgctgttgagaagatgttacgaaccgcaacaggatcgacattgccttctgatgctttaaattcatcagcgtacatgatatagacgataactgcaccgacaaccccgcccaagacttcagcaactgagtaagggataaacattgcccatgaaacgttgcctaagatacattgtgctaacaccatggctgggttaattgaaacatctccgaagatgaataatgaaactgtaatcccaaacccccatgttgtaatggcaaataaatgacctgagccacgatactttgaacctttgaggacttcatcactgtgaaccccaaccccgaaaatgatcatgagcgctgtgcccatgaattctgctaataactgatgaatcatgaataaattcctccaaataataacgatttaatatctaaattttgatagctttaacgcgttacatcaggatagacccgactcgggcatactctgataaacagcaagataaacttgattaagtgccacgtcatgcgccttggcggcagctagacaatcgtcgaactctggactatatttttcgagatcgtcatagttcacgattttgacccgaatatcgccgaagcgcgtggctacagtgataaaatgacgtggcataatggtgcgccccatcgtctggtaacgcacaccaacagttgctgtgtgttttaagatcagataagtcatggcttgttgatcggctggatgaatcatgaccgttagcttaattgcgggccgatttttcttcatttgaattggactgaaaaaggcatcgagcgccccattgtccatcaataaatccaaaaccggcgctaaactttctgctgactggtcatcaatgttggcctccaacactaaaatctgatcggtatcggttttaacaacctgttggcttagttttttttttcgcacaacatcacgcgtaatgcattgagttgcggtgtttcccgattaccaaaaccatagccgactttaatgatcgtttgatcgtctgggattggacagaattggtcgacaatcgttttgacaatccccatcccagttggcgtgatcaattcggtctgcaagtctgggttttgtttaattggaatcgcactaccgacgcgcatttgcatcacagcggggactggtacgggcatcatgccatgcgcgactttgataaagccactcccatccgttaattcggatgaatagacttgattaactgccaataattcgagggcgacaaacgctccaacaatatcgacgattgaatcaagcgccccaacttcatgaaaatgaacatcacttaatggtaggtcatgaacgaccgcttctgattgcgcaatttctgtaaaaacttgtttggcgttcgttttaacataatcgcttaaatcactgtgatcgatgatggcttcaatgtcttttaaatgtcggacgtcatcaccatggctgtgcgtgtgtccatttgcgtgttgatgcgtgtgtgcatggccagttgcgtgtgtatgcggatgttgatgctgtgccggtgttgtttcaataaaaccttcatccttgtgcatggcttctggcaaatggacgtcaaaatcggtgccataaatactacttttagcaatccgttctgcatgtaggtggtagccagggacattcaacttagctaattctgtttcaaactgtttgaaatcaacccctaaatcgagcaaagcgccgatgaacatgtccccactaattcctgaaaatgcgtctaaataaagagttctcatttgtcatcctccgtgtcacttaaatgattgatcatacttgctgagtagcccgcaccaaagccgttatcgacattgacgacggtaatcccggacgcacaactattgagcatggtcatcagcgctgttagtccgccaaagttagtgccatagccaatactggttggcacggcaatcaaaggtttttcgatcaacccaccaaccacactggctaaggccccttccataccggcgaccacgatgacaacttgggcttggcgaatttcatccaaatgttcaaacaagcgatgaatgcccgccacaccaacatcatagattcgtttaacttgattaccgtatacttctgcagtgaccgccgcttcttcggccactgccatgtcggaagtccccgctgtgacaacggcgatatagtgatccgtggttggtagtgggtcaaccatcagtactacacattgcgccatttcatagtacattgctgtcggttccgcttcttgaatcgcagcgtacttttctggggaaactcgcgtacataaaatattttcggcatgtcgttttaacgaaccaatgatgccaatgatttggtccgccgttttaccggcgccataaatcacttccggatagccattgcgcttttgccgacttaaatcaaccttggcaaagcctaaatcatcaatggtctgcgcatgtgccagttgctttgttgcttctgtcacactgactttttggtttgcaacagcttctaaaagctgttgtagctcatttgttgtgtccaaactactcattctttctattgttatttcacaataacccctaaaccatcagggatcactgtcactttggcatctgccccttcaatctcgtaggcccgttctaacgctgcatctaaactggttgccaattccatatgcatgtctgtaattaattgtggatcaaccaaatctgacacgaaaatcacatgatgttggaccagaatccgagccaagatttgtgatgtccattgatcagggaccgtttcaagccgtggtgtattgattgcttggtctaagaattctttaggatccttaacgtcagcaatattgtgatagaacccatcaccaccatgcccgtcacgtgcaccagcgaccatgataatcacgccaccttgtttgttcgtcgcttcagcagcagtcatccctttaacggcttggtaaatattttgatcaagtggatagccaccatttgttgaaatggcgatatcacaatcgatcttgtcgacttctgataaactttcaacgaagtcacagccttttttgtgcgctgtttctaaattaccggcgaatgaaccgatgatgtgcttgtcttcatctaaaacaacgttcaagatgaattcaagcccagcttgtttagcggcataaaccatatctttgtggactgggttatgcattaaattcccggttcttgaatagtgggaattgatgaattcacctgagtggttggccataattgttttgtatgaagccacacccggtaaaacagacttccgcccgcctgagaaaccagcgaagaaatgggattcaatgaagccttcagaaatcaataagtcagcttcaacagcgactttattgataatgcaatcgccacctgatggcaattgaccgattttcacaactgagctgtcatcggttgaaacatgcatgacgatttcttcatttgcaacgatttcttcaccatatttgttaaccaattcttcgtgcgttgatggtcgatggaacccagtcgcaactaaaatccgaatccgtgcatctggtgctacagaacgaatccgtcttagtaaaatcggcgtgatgatatgtgaaggaactggtcgtgtatgatcagaactgataatcacgatattctttttccctttagccaactcttctaacttagggctatcaatgggattgtccaatgatttttcaaccgtttcggcttcgctcattggattttgatacgtagcagcttgtgaaacaagcttcccggcaaaattcgcgtctgcaatattagccgtgataattttttgatcgtaaggtaatttaatggctaccaaactataggacttcctttctcaatgctgattgaatgcttttttaaagctacgtccatagttatacagattttctgaaaaggatgcggtataatttatgaacaacatttcattattacttttaggtgtaacaaatgataacaaccttatagtcttcaagacgtataatttagattaaagttatttaatgattagcagatataataaatcagcacaaagggtaggcagatgcattatggttttaacagacattgaatttttaattaactttttagaggaacgtcacgtcccagtgattaccaaaaagaagcacacatacttgacgtaccacggtttggaagaacggtatacttatattctgaaaaaaggcgtgattaaaaactcgatcattttacaagacggtcgtgaattcaatctctcttacattacccagccggatgtcatttcacttttacgggatgaaatttcaaaatatacggatcaaccgtttaacgttcgcgttgaaacagaggaagcaactttctatcagattgaccgcgtgaccttctggaactacgtgaatgccacccccgagttacagaattacgttaaaaattactaccgcaaaaaattatccgagaatatttatcgcttgcaaaaaatggtaatgaacggtaaaaacggcgggctgtgtgccttcttatacagcttaattgatctctttggtaagaaacgccgcgatggcatcctgattgacttcgtcgttacaaacgaagacattgccggcttctgcggaattagctcgcgcagtagtgtcaatcgcatgctcaaccaactcaaaaaagacggcgtgattgaaaccaccgagcataaattcttaatcaaagatgtcagttacttgcttgataatatcgccaattagcgatttgttaacatatgtaaacatgattcgtgattgaaaacggctatgagacgcgtagccttaatagtcgagaacaaatcagtggaggtttttatgtatgcatattccagataattatttaagtccccaaacgtgtgccgtgcttgcagcggccgctattccagtcattggcttggcactcaagaaagttaaataccaagtcaccgaaaaaaaagaaacggtccccatgttagggatttccgcttcactatcgtttctgatgatgatgtttaacgtgccaattcctggcggtacaaccgcccatgctgttggtgcaaccctattagcgattctcattgggccgtacgccgctagtctagcggtaacgattgcactcatcatgcaggcctttttatttggtgatggtgggattcttgcactcggggccaatattttcaacatggccattatcatgccatttgtcggctatggtctctatcgactattccaaaaagcacaccagcccaaagtgggagtcgtagttggcgcatatctcgggattaatgccgccgcattaatggccggtattgaacttggtctgcaaccgctcgttgcgcataacgcagctggccaacccatgtatgccccttatccgttacacattgcaattccagccatgttgttcgctcatttattagtcgctggttgggttgaagccggctttaccctcgccgtttatcaattcatttgccgggttgcacctaacgaactgttcgttgcaccacgtcaaacagttgatccacaaaccagccgtcgtttacatcgcgcgctttacagtttcatcggcctattgattatcttatcgccgattggcctattagctagtggtactgcttggggcgaatggagcgcaagcgaactcgttacacaactcaaacatgatcacctaggtcacagtctaccaagtggtatggcccatggcttaaactttaatgccctctttagtgactacacagttgctggcgttccattatcacttggctacatcttatcagcggtaacagccgtcattgttttttatcttatcggaaaactggtgatgaatcattattcaacccaatcctaaattaccaacttggcttcaaacaacggaagctacgcccaaaacggtcgcgcaattcgaccgttttttaattcaaaatttgtgctttagtgatcgtttgctgcggcgctttaatcaaacaaagcctcaacctttaaccgcccatcaaacgcctggtattcaactgattagtttattggtgacactcatcattctcgtgttaacccatagtctacttttaatttggttgattggtttattgacgttaattcgaatttgccgcttaccaagccagcatttatggccgctttttaaacgcgtcggtgatatcagtatcattgcgattttattaattctaccgaatttttggctcggccaagtcgccacaacgcttttatttatcgtacggactgaaatcatgttattaaatattgctttctttctcgagacgatcacttggcccgcttttattgttgctttacgtcaattaagactccccagtctgctcattttgacactcgaaattagtctgaaatacagccacttgctcgcccaatttttacaagaatccctctgggcaattcggctacgctcaactggtaaaagccaccaacgacaaaatttagtcggttcactgattggccgcctctacttaagttcccgcaactacattaccgctttatacgatgcgatgattctccggggctacaccggacaagtcacccgacggacgccgctaacagtgaatcgctacgactggcgcttaatcagctgggatctagggctattttgcctattctgtttcattcggaggtaatcagatgctgaatttgcaacacattcactacgcctatacgcaaaccgacagccttaacgatatttctcttaccatcgatgcaggcgaggccgtcgcgtttatggggcctaatggttccggaaaatcgacgctgtttaaattaattaacggtttgattcagcccagcgcaggacaatattattttaaagaccaacttgtcgatgcccgcttcctcaaaaagcctgcacaggcgactgccctccaccgcgcaatcggctttgtgttccaaaatagtgacgttcaattatttaacgaaacggtgcgcgccgaactcgcttttggtccagaacagatgggcttagccccagatgaagtgcaaacccgcgttgacgattgcctcgcgttgttacaaatcgaacacttagctgatcgcgtcccttatcaactttccggtggcgaaaaaaaactcgtcgctttgggcagtgtgctaacgatgaatcctgaaataattgtgctcgatgaaccattcaacggcctatcagccgcctaccaaacgctgattatccacttgctccaacaactcaatcaagccggcaaagggattttaattgcaagccacaacctggctcaagtcaaacaagtcgctaaacgggtggtcgtctttaatgaagaccatcaagtgacccatgacttaccactcgcaaaacttgaacaagaaccggaactgcaacgaactttagcattactctaaagagagtgtgttgtagttactgttaatcgcaggcatataactgatagcacaaatatgcggatatcaaaagcggcggatggcacaaaaataatttttgtgtcatccgccgcttttgcattttatattaatcgccttcgatttgtaaccatccctctgtcgcattgaccgtgattgactgtccaatcggtaacgttaaaatcggctgggtatgaccaacattaacgttgtacaaaacggggattgtcttcaaaatcggaaacttattcaaaatagcgattaaatctgtctcactcagcgcgacatcggttggaatacgaccgataatcaaggccttcggatgttccatactctgtaataatgccgccaaattgcgtgaaaaatcaaacggatctgacccatctgagcactcaatcaataacacttgatcattataatccggttgataggctgtcccttgtaatgtataaagtgtatttaaattaccgcccactaacgtcccagttacacagccagacgtataactctaccaacgattaggctggtaatcccgcgctgcattcggtaagtaccacgcatcactcgaccactctttggaagccgccaaccgaattggtccagcttcctgcgtcatgactttttgccaattatgcgcttgataatcgcccaactgatctaccaatttaaacgaaatataggatggtccataatacgttatcaagcctgtcttagctgtcatcgcatttgccagcgcgctaaaatcggaataaccgcagattattttaggatggcttgcaatcaaatcaaaatcgatatagggaagtagctcattgctgttataaccaccagtcaccgctaaaatcgctttgacattgtcatctatgaaagcagcgtgcaaatcggcaatccgcgcttcaattggactagaattgaattggtccattaccaagacatgctgcccaaacgtcacctgataaccaagtgcactcaatcgatcattcgccggttgattagccacatatccgccaacactttgcaaactattactaggcgcgatgacccgaatctcatcaccttctgacaatcgtgtaggaatcatcttaattcacgcctctccgttaccacttcaaaacgctcacataaacaggcaattgtcggcgtaaacacctgccctgcctctgcatattcagctttaaaaaaaggctcgtgaactgaacgccaataagcaagggttcgatcaccctcgccctctaaaaaggcatgttcagcgtcgacttgattatacttaacaatcgtgcacattatcgttttcgtaattgcaaccggccggtctcgtccatctaaaataacattataatcccccacttgtgggacatgctcatcgggttcatacaactcaatcgcagaagtggtggccgttttttgaccgattattaccaatcgtgccaattcattggccatttgttctgtattcccaaatgaataaatctccgctggttgtaaatcaggtggtaactgctgttgttctataaaatgttgccaatactggctcacttctggtgtcattgacatcccctcttccattcgtaacgttgttgttagtttagcagaatttaaccatttaaccaaaaaaagaaacttacccattaggataagtttcttttgatactttatgcccaccgacgcatctttttaagcatcatcggatagcttttaattaggaaccattgtttcatcttaccggttgtttggtcggcacgaatcccagcaatccctttttcaagcatctgttcaaaagtgattgttggttctgtccactgaccatcaacgtaacacagttggcaatactgatttgacttggtgccatcttgttcactaccttggttttgtgcagtcagtggcatgccacaactttgacagaatttttccatgggtggactcctttaacgtgcttttcaaaccatgttcctacgtttagtctaattagccaaacaatcggcttcgccgcttattcgtctaattttgctaatcctcagaacataaccagtttgaacacacttattttcttaacgtgctttcatcaacagtttcctgcgctttgctacacttatcaaatcatcgactatgtcgctaattcgttaagttatgcaaatgctcagaagctaaccgttgatgacgcacttcttttatttaatattcttcaagaagttaagcaacatcgctgctgatttttggcctgcttctacgatgaattcgtcaaacgttacgccggcttcttcgtcgccgacgtcgctcatcgcgcgaatgacaacgaatggaatcttgaattgcgttgcaacttgtccaattgcagcaccttccatttcacaagagagcgcttcggggtaaatttctttgattgccttgattttatcttggctcgcaacaaattgatcaccggtgacaattaaaccaacacgtggttgtatgtcaaccgctttagccgccgcttcgatttgttgaacgatcttagcatcactttcaaatcgttggggttgttgtggtaattgacctggtaagtaaccaaaggcagttgcttctgcatcgtgataagcgacttcgcttgaaatcacgacgtcgccgatatgaaggccttcaccaatcccaccagctgaaccggtattaatcacaacatctggtttttcttcggctaataaaatcgccgtcgtcatcccagcttgcactttaccaattcctgattcaaccaacgtcacttcatgaccgtacaattgacctttataaaaggtattgccagcaaccgtgtgttgttgcacatcttctaattttgttaaaagcgtccgaatttcttcttccatggcgcaaatgacactaattttcatactaattctctccattctaaaaaaacattaactttaccattctataggaaaaaaagaatcaagtaaacgataataattaagccaaaggtaatcccaatcgcccaattcaaccgtttcttcattcgtttaaccgctggtggatcgactttcttagtccgacgcgttgctgtttctggttcgccttcagtcaccgctttaagggcttctttttgttgttcacgtgcatattcacgttctgtcctgaggcgctcttgatcgcgctgtttaaaggcggcttcttcagcctctttttgttgtcgatattcttcgcgcgtcttaggttcattcgtcatttctaccgctcctattttgcttgtaattgccagtaatacaacgccataatcgttttggcatcacagattaaaccatctgcaacggctgcttgtgcttcttctaacgtcaacttttcgacgttcaagaactcatcgtcatctagcgagcgcttatgcgtgaccggcgttagtgtatcagtgtagtataaagtcattaattcatttgaaaaaccgggtgatgaaaagaaatccgtcacgtgcacgagcttttgcgtcgtcaaacccgtttcttcattcaattcacgtagtgcgacctgatctaagttcttttcacctggatcaatctttccagcaggaatttctaacgtttcacgttgcatgggggcgcgccattgtcgcactaaaaggatgctgttatccgccgtaatcggaataatgccaaccgccccatgatgatagacaatctcgcgacttgcggtttgtccatttggcagtgccacttgttgaacggcaagatcaatgatctggcctttgaataatgtttcttccgagaggaccttttctgtataatccatctgctaatgccacctttaccgtttaatcgctattatacgcgcatttaaaatcgtccgccatcgtcaatgctaaattcaggttcacggccgaattaaaaatccatccttaggcggatactcttttaccttaattcctgttagaatgaaggcatcaattaaatcaggagctgacaattatgtttaaaaaaataacgatttggtgcacaggcatgctcattacacttgtctcaatcccaattttggcaacatgctttgatatttatggtgattgggataatttcatctggttcagccttggtttattattagggctgatctacgttacaatcagcctcaaacggcttaaacgacaaccagaatataaaaaagatcagcatatttcaccacaaatgctgaaacactaccaagatgctggcatgagtgatgacgaaattgactttttcagacaaacgatgcaacaagccgaagcgcaaattaaggtacttgcaaccaacatgcaagctcttcctaaattacgggcaatcgatttaaatcacgatacaaccaaggtcagccaatcgctttttcgtgcgattgtgaaagatccaaagcggcttcacaatgctggcgactttttataccggcacttaccatcaatcaatgaactgactagcaaatacatcgaaattaaccatcatgaagtcaagacagccgatacctatctcgttttagataaatcggctgcggcaattgatgcgcttagtcaacagattcaacaagactacgcggatttcgtggccgaagacgtcgatgacttagacacagaagtctccgtcgctcaacaacaaatcaccccagatcacaaggaggaagactaatgtctgaaacgcccaatccaacaaacgatttaatgaatgatttattaaaagatcctttcgaccaaagtgcgccagttgtcactgaggaagcagccccccaggcagaggcctcaattatcaataagctctcccctgaacaacaagcacaggccgaacaattggcacaacaactggacgtcaacgaccaacaagccgtcttgaattacggcgctcaagcccaaaagaaactcggcgctttctcccaaacaatgctcaaccaagtccaaagccaagaaacaggcgaaattggtgacgcattaacgtcattgatgtaccgtttaaacgaagccaatcctgacgaattacgcgccgaagacagcaacgttttcaagcggatgtttggcaagattaagaagtcggtctatgaaatcactgcgaaatatcaaaaaattggcgcccaaattgatgggattgccgttaaattggacaaagaaaaaaatgcattaatgcgcgacaatgagacgcttgaaacgttgtatgcgaagaataaagcctacttcgatgcactcaatatttatattgctgctggtcagttgaagattcaagaattagaaacaacgacgattccagaagccatggaacgcgccaaaaatgacgataatcaaatggtcgtgcaagaagttaatgatctcaatcaattcaagaaccgcttggaaaaacgaacttatgatttagaattagcacggcaaatcacgttgcaacaagcaccacagattcgcttgattcaaaataccaaccaagcattagctgaaaagattcaggcttccattaacacggcgattccactctggaaaaaccaagttgccatcgccctcaccctgctccgtcaaaaagatgcggtcactgcacaacgacaagtgtctgaaacgaccaatgacctcttgaagaaaaatagtgcgatgttgaagatgtcttcaatcgaaaccgccaaagaaaatgaacgcggcgtcgttgatatcgaaaccttacagaaaacacaaaatgatcttgttgaaaccttacaagaaaccctcaagattcaacaagaaggccgcgaaaaacgccaagtggctgaaaaagaactcaaccacatggaaaatgatctgcgcgaacacttattggcctatacccaaggtcaaactgctgctaacagcggaccaaaagaagttaattaaataattagtaattaatcctaccataaattgtgcaaatagtaactattgcgttgtttaaaatcaaagattgctttttacgtcagaaatgctagaatatttaagtgacgtttggttgtaaaacaccatatgttgtatatcaataataatttaaacacattttatggtcaaaagagggagactgatgacattgctcgtacttgctggcacaattggtgcaggaaaaactagtttaactaaatatctatctgatcacttaggcactgaagccttttacgaatcagtagacgataatgaagtattaccattattctacaaagatccaactaaatatgcattcttactacaaatctatttcttaaacaaacgatttgatagtatcaaacaagcatatacagatgataacaacatcttagaccgttcaattttcgaagattcattactcttccacttgaacgctgatcttggtcgcgctaccgcaaccgaagtccgtgtctacgacgaattattagctaacatgatgcaagaattgccatttgctgcccacaagaaacgccctgacttattaatccatgtacgcgttagtttcgaaacaatgctttcacggattcaaaaacgtggtcgttcatacgaacaactagaagccgatccaaccctctacgactattataaagaattaaacagccgttatgatgcttggtatgaagcctatgacgaaagtcccaagatgcaaatcgatggtgacaaattagacttcgttgaaaacgaagctgatcgtcaaaaagtcatcgaaatgattgacgaacgggtgaaagccttaaacgcagaacaagaagcaaatatgggtgcctaattgcacaaaaaaagccgttcgacaaattgtcgaacggcttttttattatgcttgggtacctttttgcatccataattcatgaataatgccatacagccgggcatagtgatcgctactagcatttaagcgccacgtaaaatacaacgcctccggattaacgttttcgggtaaggcaatgctcgacgtccgaacaatcaggtctgcatcccgtaaagcttcatcggtcgtactaacagcgacatatttgatattatcgagtgctgttaagatatccatatagccaatgtaatcttgctcaatcacgagtgcgaccttcacctggcttacaggatgatactgctggatgacttgttgaattaaattatagtaagcctttatcaaattctcccgcccacttgctaaaaaactaaaagctggttcgaataagaggtaatctacggtatcactaatttttttatggagtagttcattgggttttagctgcggcatacgaatgactaattcattaaaaacgacagaggtcgcgtccatcccaaggatataggtcgtcaccgtagtcgttaacaacgcatttttgaaaatatcatatgtgtgctgcgaaatctctaactcatgcataatatcaaatggaatacgctccaaaaaggcagtcacaaaacgatgaatttctggtatataacgttcatctgcccaatcagcagtcaccttagtacttgttattgagcgtaacggtactggacaataccgtaacaagaagaatagtccagcggcttctgaacgcccttccgttaacgttaactctgccaaacaagttcgtaatcccgttgattctttagtgaaatcggctgcaagtaaatcactgattaaattaggatagggataccgaatagttgctaatttttcatcgggctgcacgactgcaccggccatcactcgataataagttactgccagaatcgtggcgccaatttcgtgcgttaataggttaggcttttgcaattgaaattcatcacagacatagtcaaaggccgacaaaacacattcgtgattgatttcttcaaatagccattgatgcccaccagacgccaaccagtataaggcggataagaccaatcgaattgtcttctcatcaccttccaaccggattggttcgtatgaaacccgtaagttgaaggcgcgggttagatcgcggacttgcttcaaatgacgtaatacagttgctttactactatcatgctctgctaagaaggttttaaacgatatatccccgccccgcaatagaatctgtacgaaatcatagatgtcagaatgttgtactaaatataaatgatagacatcacttggaattgcgaagagtcgcttaacatcatcttcctccgtccctaatattgcctgcagatccccaacaatactgacatacgtattgtataagctactataattacggtctaacaatgttgccacttgcttcaaattgacgtcatcgattagtgcttcgccctttttagccatgctcattcgttttctaatgggtaattcatcccatttgacattaataatatctaagaaaagagcatacttatctttttctgccgatgttaaataaacactatcggtatccacattgcttaaccccttgttccaaataattgatatatattttaccatcaatcgatattaaagcataaccattctacagcgagatttgttgcgtataacaaaaggcgatgcgttattaacacacaccgcctcaaaagctgaaaataatttcatcatcagctctaattaaacctgacacgctaataacttaaatcaccaattgccatttcaaatcagcattatatgagccaatctgataagcatcattataaggtagtgataactgtaactgactttgtttccaaccaactgtggttccataactcgttaaatcttgctcactgattggccgctgtagaatcccatcaatccattgattatcgggtgactcattagttaatgcttttgcatcactatcatttaagcggtatttaaaattttcttgcatataaaagggattattgggtcgttgatttatccccagatagcctagttgtaaatcaaaatgactacacaacggattacatatgactactttcggcgcttttggtgtaccagtatctgccacttttagttgtacacttggtacctcatttagcgcaatcgtccgattagtaccccccctacttcgacccaaaatttcgtcatcaaacgtaattgttttcgggatgccaacctctactgccccgtttaaagttaatttgaattggaatttagcgattggatttaaatcatcatttgcaataggtgcacttgccgccttttcagacaacgtaaactcaatgtcgcttgtccgcatgacatcacaatgcagcccttgctccgtagtagtcggattccctgtctgattctgactagcattaattagctgtgccataaagctctccgataaatgcaactgcgaatcggttatcaccggttgccacactacattttgatctgcattaacacgatagtataacccaaaagaatcaggcgggttaactaggtcgacttgtcctgtaatcccgtactgcggggccgcatgcagtgtgccatccgcataattaaactgcgcatggccattcgattttacagactgtgcatttttggcacccggatcagctaatgtgacagagcgaatctcaggcacctgaatgcctggaaaatcgtggccctgaccaaaaacggctttatcatgattgggtgaaatcggagcatcgggtatgtagattagttcacgaataatactttcaagtcgcgattaaattcagtatactaaatttagataaacaaacttactggaggatagtattcatgcggacttggcaaaaatggactttgattgttctggcacccttcttaataccaattatgtattttgagaaccaatattttatgagagagcagtttaaacagtcgcaaaagaatatgcagcagtcaactttaagtgattttaatgaccaagcaagcggtcaatacgcggcctttaaaatctacgctgtagccaaaccgcatggaaaaatctattattttgtcccacaaaaccaaaatggggccaatatcgatttacaaaaacaagaagtcgcactcggtaatcagctttatgcaaaagcacacaaagaatcacccgacattgaccatatcacgttgtacgtcagttatactgctaagaacttgcaagacaatacgtatgcttttaagccaaccgccgaggcttatggttttgtaaaatcacggtttaagacccgttatcaacgcttattttcacaaactggaactgaagccatctatgatatgcagcacaatacaacatcggtttcgtttaaagatttacaaaaagatagcacaacaattccgatgattcgtcaacttgcaattaaccaacaattacaagcccatgattatacccccgaacaacttacacaattggaagcacttgatttcccgggaaatgatcaagcaaccaattttgactttacaacagatggtctaacattgaaattcgcaaagaatcctcttgatattgaaacaattgccctgccaatggcaacggttggtccatacctcaatcccaatcttgtcccagaagacaatcaaatgccttccaaaaaaggtggtgctaaaaagattgcactcacctttaatacgacattaaaacctagcactattacgagtgtcattaatcaactaaacgatttaaacatcaaagcaacttttttcactactggtaaagcagctaaagaacatccggatcaactgaagcaattactcaaagctggccatgtcgttggcacccaagcgtataacaacgatgatgacttggatacaatgagcgcgtcagaaattgccgataacctcaagcaaaccgatgccgcctacttcaaagccagtggtcaattgccacacttattacgggtcacaaccgaaacccctagtacggaattaacaaccgctgctagccgggcactaatcgcttggagtgttgattcggaagattggcgcttagatattgatgcgccgacaattgtcaaaaatgtaaatgagcgtattacaggtggtgatcttgtcctactgcacacaagtgaggcaacgattaaggcattacccgcaattgctaaagaacaaaccgctcaaaaacgacatttcgtgacagtcaacgagctcttcaagcaacgattaacaccttatcaacaatatttcaaagctggtgatcaacgctcgctacaataacgcaaaaaggcccgacaacttaaattgtcgggcctttttgtaatctaaacgtgctccgtaagccgcacgctatttatgttttgataaatcaacttcttctagtggaatcatcttagttttgtaccgtactttatagtaaacatatagtacgacaaacaatggaatgctcatataactaatcccaatcgctgtccaatcgaagttcttaaaggcttgaatatcttgccctgcaatcaccaataaacaaagcacgaatgcaaaaatgggaccaaatgggaaccaacgtgcatgatatttcaattcgctcaactgatgaccttgtgccttgaacgcacgacggaaacgataatgtgacacagcaattcctaaccaagcaataaacccagtcaacccactagctgccactaagaataaataaatccgagttccaaaaatacttgtcacaaaggttaaagctcctatgattgttgtaccaatcagtgccattactgggacgccacgtttgcttgtcttagcgaaaattttagctgcatagccatcttcagccattgaccacaacatccgggatgaagcgtacatccctgagtttgccgctgataacactgatgttaagatcactgcgttcatgatgctggctgcagaagctaacccagcccgtttgaacactaacgtaaatggactaacagcaatattcgtttcactcgcgcccaacaatgagtggctatcataaggaattaaacaagcaatcacgaagattgaaagaatataaaatagcagaatgcgccagaaaacttgtttaatggcctttggaatactcttttctggggtctttgattcaccagctgtaatcccaattagttcggtgccttggaatgagaagccagcaatgacgaagacactcaacatcattggtaacccaccaacaaatggggccttcttataagtgaagttactcaagccagtatgatggccacccataatcccgagaatcgttagtaacccaacacctaagaaaataatgaccgtaatcactttgattaacgcaaaccaatattccgtttcgccgaatgatttaacactcgtgatgttaatcaagaaaattaataatagtgcgactaagctaaaaatccaccctggcatatcaggaagccagaattccgtaacgagtgccgcggtactaatatcaaccgccaacgtaatcgcccagttaaaccaataattccaccctaacgcaaaaccaagggctggatcaacaaaccgcgttgcataggttgagaaagaacctgagacaggcaagtacgttgccatttcacccaaactggtcatcaagaagaagaccataatcccaatcccacaataggctaacaatgcaccacctggacctgcctttgcaattgctgaaccacttgtcacaaataagcccgtcccgatactaccgcccaacgcaatcatcgaaagatgccgcgtctttaactcccgcttcatttcatttcctgccataatacttcgctcttttctctatgatttcaagaaaaagccccaaccacgttctagcaaacaaaaaaacagtctttttgtctgctaaaaacgacaaaaagactgatagccttataatatccgttgatagcgccccgtaacatttcgttacgacagtccttgatttattcaaccaagtcccaacatcaaaatgaataagcaaattgacatttcggcaaattcccctttaattatccctcattactgcttagtcagttcaggataacgactcatggtttttgcgacctcttatcttgttagaaatgagtatacagaattcacacaaccacgtcaattatttccattaaaaaaccacgattatttcaatcgtggttttcattttgcttattgttctttatctttgcgtgatttccgccataaaagaattatcaatagtaggataatgacaatcataataccgataatgacatataaccaccagttattgttctctggtaattcaacggccttatcgttatattttgcaacttcctgacgggtaatctcgcttagtattggttcctgtataatcaatcaatccattttcattggttgtcgctgtcgtaggggtcacatcgaccgtaattggtttcgttccactattttgaacccgcacaccaacttcttgttttcgaccaggagtaacttttaaatcataatagcccaactccgtatccgtttgattatcaggatagacgggcgtaaccgaataagtcactttctccgcctgaactggttgatgactaaccatcaacatcaggccaaaagtggcaaccaccgctaataacaatccaaatcgttgcttcattcgtctcattctattcgctactccttctaattcagagtacgttttatgtaataaaataataagttttcagcaaatatatatttttaattttggtgttaattattttcttcactattaatcttaatcctttgttaacaagtggtacggcgttaattggatatgccattgtccattttttaaataaattatcaattttctgaaactatcaactaatcaattgaaaactaattttcaattccagcacaaaaaaagcaatccaacaaccggattgctttcactctattttaaatttttaatgatcttctggatgagtaattcacgctgttcggctgattgattccaatcaatcactggaatggcttgatgcccaattgtctcaataatcaagccagaaacagtttgccgttttaactcgttcgcccatagcatgtccgccttgtggaacgcagcgttaataatcaatgttccttgtttagcaacgggttggaagtcattgaagaccgtatccaacttacccgtatctggataagacttaatttgtccttccgtggccaacacaacatcgtagattgaaacttcatcggctggccgcgctagtgtaaaaccaccactattaccagaagccgatttcactagcccagccactactaacttacgaataattttgcgtaggtaagtctgtgacccgcctaagcgatgatgaatgacttcagacgaaattgtgtgttcaggatcttgcgtcgccaaaagtacgataatacaagttgcttgttcaaacgcccgtgttaaatgcattagccctatcccctttttaacagtcgcgcactacgcctttcgcgtcttagtgaatgaaccagaggattgacctgcgtcggtttgtacctcaaacccatatttttcaagaatgtgtgcaactttcttaaaatcatctctatcgaacgtactgatattaccatcaattgtttcaatttccaacttattcgctaaattacagaaggctttcactgccaattgtgctaaaccaagattttggaaatcataaacagctaagcgtgaagctgctcctaatgtttcaagaactgtaatgtgcatttcttttttccatttattggtttcaaataagagttgtgcttgaaaatcaaccgttgaatgtccaaagcggtcgacgttagcgtatggtgtgtagacaaaaatcgaacttgtcgattcttgttgaccattttcgcgatagtctgtatagacgatgtactgcttaaccttttcatcattaacctgattcatacttgatagaatcgtcaaattttcgtttgcctcaatttgcgctaacttccgtgcataggcttggtcgttttcgtttgccatttgattaacccccatttgtctttcaaaccgattataccatagctttctcatttaaaccgtgatttattacggttataaccatgttatttttacaatttgaaaacgttcactattcggcggtagtactgaactcgttgcccgcctaaataatccggtagttgtgattgataagtcttctcgaactgaactttctgtaaactcgcttgcgatgcttggttggttaaaaagcaggccgcattaaaggtgtttacaccagtttcttgcgcataggcttgcatcgttgccggcaatactgcgctgataatcccacgtcgttgatatgccggtaagatggcaaaactgagttcatatgccgcgactgattgtccatccgcactaagggtaggggcgagcattatcaatccttgcaccacctgcgttgtgcgatcaacaatcgcccaagcatcctcatcattcatcaacattgttagaaacgactgtgcttcttgttgagattgaaaagccgtcatatttagctgcgtcacaatctttttttgacaaccaatttgatagaccacttcaagatccattagttgaaaatgccgtagttcagttgtggcagtcctaatctgcatctggaacaactcctttgtcatatcaacactcatagtaacccacttacagtgttgcgccaagtaaattcttatgtttccattaaacaaaagcgccaaagttgtggtataccactttttcagtttatactaataacgattaattactcttgtagaaagcgagcataccgatgacattccgcgattatttccatttattttcgaccgtttctcaacaagccgaatcctatgattattttttacactttattgagacacctgttcctgatttacaacggtatcccgaattaactaaaatttgtgattgggccgcttatgatgatcacagttttcgtctgtggacaagcttgcccctcgacgaattcgagcagcgttttgctgaaactgtcccattaccaagcgattcttaccagttagattacagttacaatttgcaagatacaaattttttctaaagttcatgcttgacttttaattcgaactaccgtaaattgaataacaatcataagtcatcttaattcaaactaagtagtgcattatctgggtgtcagaaagtcggtggttgctgcgaaccgatcagggtaattgttacgaaatactgaatggatgattcggctaattaacaggaccgttatcacctgtaagagtggtgtgttaccttaaaatgacacgctaactgggtggtaccgcggtttccaatcgtccctattcgcatcagcgagtagggactttttttgtagagtgcgttatttagcgcttaatatctgaacatttgcatagaacattgccaatcaaaaacacatttcaactatggagggattttcatgttcaagattgcatcgtgcgggggaatcctccgttatcagtcttttgtcgcaccagcctaaccattaaacttaaaaggatgcgatttaaatgacaaaacacaaaactagtttattagaagcaagtatcgttttacttattctgctagccatcatgggtagcggcgtgattgttttccaactttcaccacaaacacccgtcttaacggcgattgccctcttgattctatgggcccgttggcggcactttagctgggacgccattcattctggtatcgaagatggtctcaaaagcggaatcattcctatcattattttcattctcgtcggcgccttaatcagtatctggattgccgccggtgtgattcctagcctgatggtctggggcttcaaaatggtcagtgtacactggttcattccctcgattttcgtcgtctgtgcgcttgtcggcagtgccatcgggagcgcctttaccgtcatttcaaccgtcggcattgctttcttcgggattggagccacactcggactaaacactaccatcgtggccgcagctattatttccggggcaatattcggtgataagtcatcgccactttcacaatcaacaaacttaaccgcagcggttactgaaacagatctatttgaacatattaagaacttgatgtggaccacggttccagcgtttgttggctcattaattttatacgctatcattggccacacctcgaaaaatgtctccctcgataaaattggtgcgacggttgctgtcttaaacacgcacacttcagttagcctacttgcactaattccaattatcttaattttcgtttgtgctcgccttaaaatgccagcaattccaacactctttttaaacattgccgtttcaatcggtttaatctttttccacaacccacacacaccaattgctaaaattgcgagttacattgaaaatgggtttgttgcccacaccggcgataaaagtatcgatgccttgctctcacgcggtgggattaatagcatgttaagcaccgtcgccttaattatcttgaccttaaccctcggtggcctcttaatgaagcttggtttaatcgaacgcgtgatggcccctcttgctacccatcttaagacgccaggtcaattgctcagcgccgttattgcttctgggattggcgttaacctctttatcggtgaagaattcctttctgtgattctccctggtaaagccttcaagagcacctttgaaaaatcaaacttgagtaatcttgctttagggcgcgcccttgaagatggtgggacagttatcaactacctcgttccatggggcgtcgctggcgtttttgccgctaatactttaggcgtccctaccttgagttaccttccattttgtttcttcagtctcttatcaccaatcttctcaattctcagtgccgttactggcatcgggttaaagagaaaaaccgcctaaacacgcaaaaaaggcccaggataaaatatcctgggcctttttttacattaattgcattaggaattgaccgccatacaccagcgcaaaactatacactgcaattgaagctggcttgcataaaataatgatccatgtaaatttcttcaatgacatctcggtgagcccagccatcaagcataagacatcgtctggtgcgaccggtaagaaaatcgcaagtgcgaagaagcgcacaaagtttttcttttccataattgtcccgatatacttgtcatacgttttttcactgatgacgtgtaagatgaacggcttcccaaattgtcgtgctaataagaagttcaagatagaaccaattgcaatcccgacgtaattataaacaaacccccaaagtgggccgaataccaaaaccccggctgcggtgctaatcccgcctggaatgacaggaatcacaacttgaataatctgaatcgtgatgaaaatcagcggaccaattagcacagagtgccccaaatacgcctgcaacgcggtcgtgttattaaaaagaccaagccgagaccaataaatagccaatgagatgcttccgattaatgccatgagagacgttgcgctgattaagcgtcttgaaattgttctactcatccgctgaattccttccaaggttaattttaattataatttaccacattcaacattattttttatcggtcgctagtctgatttaaaaaagcttaactttctaagaacgtccgaaatggtttcaatccttgtgcatgatatttttcaacaaaggccgctacttctgctggatcctgtgtttgatcatcaatcacgagttgttcaacgggtaacggacgttcgttagcaattttaacatcaatcacaacaggttccttcgtgcctttagcagcagcaaaagcagctttcaattcagctaatgtccgtaccgtaaatccttttgcgcccatcgctgttgctgctgcaccgtaatctgccccttgaatggcaacccctgagtgtggttgacccttatcatcttgttcagcttcaatgaatccgaatgaatcgttgcttaatacaacgttgatgattggcatttggtatttaacttgcgtgataatatcttgcatcaccatcgtgaagccaccgtcaccactaatcgaccagatttgacggtcagggtaggcagcctgggtcccgattgctgcaggcactgcgcaacccattgtggcataccatgctgataacgtcatacgttggcctggatgcattttcaagaaacgcaccccatcgattgaaacattcccaacatcgagattaaagatggcatcgtcagtggccatctcattgatttgtttgaagacgggttccacacgtaacggtgtttgatcgtcttcttcaaaactggctttccattcattccagttttctttattggcgagtgctgctttataaaaggcagattttttggcaactggttcactcgcggctagcaatgcctttaatgccgtcttagcatccgctaaaattccgacatccacatggtgtctgtgtcctagtttagtaggatcgatatcaatttgaataaatttggcatctggcttgaagaagtattgaccgaattcataattgctaccgacaaataagattagatcagcagcttctgccaaatcaactccgggtttcgtggctactcgcccagctgaaaccatataagctggatggtcatcggcaacaatcccttttgaaagggctgatgacatcattgggatactcaaccgatcagataaagcaaccaattcttcacccgcagcacgtgcaccttgaccaaaataaataatgggttgttttgcatctttaattaactgtaatgtacgatcaatatccgcgcttcttggctctggataattgcccatttggaataagtttgcagtggcctcgaagttatcttcaatcggttcccagcctaggttagttggaatcgtgacaactgctacgccgcggtgtttataggcttgttgaatggcttggtcgactacaagtggcatctgttcagccgtcattaccgtccgattatagactgccacatcagcaaacatggggttttcattcatttcttggaaataatccgtattcatcacacccgtagcaacttgtccaactaatgctaatacaggaacattatcatatttagcatcatagagaccatttaacaagtggactgcaccaggtccggctgagccaaatgtagcagcaatcttgccagttgctttggcttcacccgccgctgctagtgcaccgacttcttcatggcgcacttgaatgtaacgcataatcgctttctggttatgtagtgcattcatcgttgaatcaaacgagccaccgggtaaaccaaaaatatggtcaattccccagtctgccatgacttttaacattgcatctgatgcgtttattttctgtgctaccattaataaagacctcctgatgattttatgtttcacttacttaagtataccgcttaaaatgtaagcgttacaaataatcctgaataattcatactttgttgcgtaaaggtaatttgccccttttaacgtttaatttagctcaaatttaatccgcaactatttttgagtgtatttgagctatttttaagacaattttatttttgattggtgtcaaaagagtaaactactcccttgatcgtacttaaattttttaaattgtcttttttaattactagtgagctgaaattcttgaatcctaaacaatgtttgccagtataaatcatcaaaaacattggtactagaaagatgcagccataatttacgtgcatgttgggtgactctgccggccaaatgaaagagcttgaaacgtaaagtggcgctcgttgcgttccctaattcagctgagaaaaccagttttttcatggcttgaactaagttataagccacaccggcgagtaacattctaaactggttagccgtaaaactggaactatccgttttatcaaaggcaaagccacttttaacttctttgatcagatcctccatggctccacgttggtgatagagttcaaagacgtcactggcaaaagccagctccaagttagtcacgataaattcgtgtttaaagagtagctcgccagcagggcgagttgatttaatgatcacggggtaagcgcgaccccaagtgtccggttggtaatctgtcaaacggtgccactggacatctttttcggcgaagtcttccccaggttgccccacatggatcaagtgctcggcgatccgttgtagttttggattagccttgagacggatcgtaaactttgccccagcttcttcacaggcggcataaatttctggcttggcaaaacccgagtcagcccggactagtacatctaaagcagcgtattgtttcagtagcggtttcaaaaaagcttccgcatttttggaagtgtattcgttacctggccgtaatttagctcctaagagacaacccgaaaaaccatcaaaagccaacaggggatgataaccgttcgtttgataatgggtgttaaaagcactgcctttctggtaaccaaatgtatcggaatgagtcgaatcaagatcaatgatcagttgacgttgcttcttttgtgtgatcactaactgcgctaacttggcgactaattttgtgatcccggccaagtcgtctgcggaaatttggttgatatagcgtgaaagagttggttgcgaagcaactaaattatctaaaacaagctcaaagctcatgtctgcggtcagtttattagcggcagtatcgtcgaaataacccgcaatcagctgaatcaacagttgtttaaacagctggttcttatggtacctatagaacttgcggttttccttaaaatggagagtttctttcaaaaggcgcttaaagtggatctgatgcataaattcagccactaaaattagacccgcatcgttagataaatgaccaccattattagaaagaaccagatttttgttgaagttaacggtttgttgttgtaaagtcgacatatggagcactcctgttctgtgttggttttggtcgacttaacaatagcacaggctgtgctctttttgtatacgcaattaaacacctaaaaggtgttggtttggatcacggacaaacaagatgataacaggcaaagaaagaaaaactgttaaagatatgaattattcaggattattattagtaaaaatatgactcctaacaagcaaccgcagccgatgttgaaaaagaagctcaaaacgctccacacaaaaaggacgcataatataaacaggaatgtcagcatcattgccacctctttatttgcaaaccacgctcacttttaccggcttagatcaactttttcattgatcagccacacaacaatgtcgccaattaaaaccacaacaaattcaccaatgccgactgtcaaatatgtcatccaaaacaaaacttcactgaccagatgtaattctagtgcgactgcctatgacattccggccccattgatgactataaattagcaatcaaacacccctcatgtaacgtttgttgaaaaccaccatagtattgagcagttctgacaaacgaaattgaatcggtctataactcaatggtgtaaaagcaaacgttaaaactacataaagtgcagcaatcaaaactgttttagtgatctcagcaactttattattaagacgtgccctttttaagaatctcctagtttttaggtgggatggtcacgaaccaccatgtaacaagtaattattccattaatactgtactttcaagtatagaaaaaagacgaccgtttatcaacctgaaaagcatgttataattttattattagacattttaacaaccgagtaactagtcgctaaaaatcgtggatcaactaactgtctagcctaacaaatatttgacacgacccacgaaatttatacaatgaatggatattactaatgaaaatcgctattttaactgacagcgctgcgatgatcagcagtaaagtcggatcacaaccgaatattagggtcttacagatcccactttcattggatggagaagcttattatcccaatgaattaccagaagttgctggaatagaaacgctaagggaagccacgcttaacactgtaacagaagagcagatccctctaaccacaatttctgcagtaaccgatgaacttcaacaagctggttatactgacgtactttgtatacatattgccagttcgatcagtggcttaggctcaaatctctctactttcgccaaaagctgtcaacagcagcttaagatccatctctttgattctcatactcttggtcctgcagaaggagcgttggttgaacgagcacttactatgattactcacggactaaaaattgctgacattttagcagaactaaccaagtatcgccaaaagcaacatacactggtcataatggaaaatctcaaaaacttgcgtcggatcggttctatttcaaataatgcacatctcttcagtaataatatgctgcattataaaaccttgctacatttttccgaaaatggtgaacttgaagtcttgatgaaaagttcacgcacgaaaaaaattgcaacggcgctattgaataagtttcgcagctctgcagcaaaaccggaactagcaatcgtggcagacaatacaatggtcttggaaaaatatgtttcttgcctgaaagaaattatgccgcaacttcaactagtaactgatctatattcaccttcgatattttccttcatcggtccacaagcactgatcattagttggcaaaataattaactacatgcaaaaagatcgtccttcaatttaaagaagaacgatcttttttgtttgcagttctcttatattaactttttgctatttaataacggactcgcaattggccagcttctcagctttctgcttagttatctaaatcaaattgacccgtcagtttttgcaactgagcagcagtttcttccaaggtcgaaacatgttgggtaaactcatccatcgtagcttgcacttcttcagagttagccgaaacttcctctattcctgctgcgttttcttgtgttgaagctgagatgctttcaagtttatctaagatcatcttttgagtttcactgatctcttttgtaccctcatggatcttttgaacatttgcacccatagcttcattatgcttataaacgttcattgtcgacttgatggcttctgtgatcaaaccagtctgtttttcactgctttccagtgagtctgttgttgtcttgaccaaaccagttgattgctgtctgatctgttcaatgatcgactcaatttctttagtcgaatcattactttgttcagctaacttccggatctccgctgcaacaactgagaatccttttcctgcttcgcctgcactagccgcttcgatcgatgcattcaaagcaagcaagttcgtctgtcttgcaatatcattgataacgttaatgatcttagtaatgttttgtacatcactatccatttcctgaacactactcatcaaagcttgcattccgttgatctcatttgaccagttaccattgaccttgtccatgacatccaggttattttgtccaacttttgaagcttctttggatgaattagcaagctcttccatattcgcattgacattatcaatatgtgcagtgattttttgaacgttatccacgctttcagtagtttcttttgcttgtgatcctgtcacttcagcaatttcagtgatcgtctgtgcgatttcttcagaagcagttgttgtttgtttcgaaaggtcaagtaatgatgcagctttttcagaaacattcttggcttcttgctgtgtttgtccgatcagaacagtgacagaagcgatcatattattgtaactagccgctaatctgttaaactcatgtccattcacatcagctctggtcatcttttgagctagacgttctattggtaccttagaatactcgattttttcacccactgcaggcacgtaactcatcttaccttggccagcatctataaagaacttctcaagtattaataaagcacgtttgagcaaacctgcactatagtaagatattatcacggctaaaatgatgatcgccaacattgagattgtcaaggttatcaacatatgatgtgtgcctgcgctcaaatcactattgttcatttgggcgatggtccaattgtcagttgtgccattgcccttgtcaaaggtaaccttattgatctgcgaacctccaggaactttgatcgtccccttctttttcgctgaagcagccactgctttataaacggctgtcttgttgatcattttacctgctttaaaagtattattgcttttaccagtgttctttttgatcaaaaccctgccggctttagttaaaacggcggcttgaccattgtttccgatttccatcgattcaacagatttttgtactgatgaatatgaaacagtaactgctaaaacatgggctttcccctgcttatctacgattttctgggaaacacttgcactatacgaatgattagccggatcttcataaggaatcgaccaatatgcatgtcctgtgggtgctttttgataccaatcttgatctaaaatattcatatctttaggcatcgcaaaattcgaataagcatatgtaccatcagtgttgacatacatcaagttggtgatcgttccctgggcgtcgccattggcaattttcaaagttctgttagcatcttttaagttgacattattggtcaactctggtcttttttccaaactagcaatttgtccagtaacatcttgccgcatgtcaacttgttgccgttgcaaaacatttacagccgtcacttttaaacggtcatttttctcgatcaattgctgacgtgtattcccgtatgagatcaaattcattataattgccggtaccaatgctatcaataagagtgacgataaaaaatacttctgaatactctttttagcaacttttttcttacttgccattttctttccccatctttccctaactatctaatttgatcccctaaggatctcatgactatcgttcacaaaagcactgaagcaaacaacccctaaataatatgtttgccagtatttgcttttgcttgcgctgaagtcatcaaattaacgagcaattactgctcttttacccctttagccccactaaaacaaaacataactttaacgcagataatctaatatcgaagtttgcatgaccttagtccccatagccaaggtcgaacgatatgcaatcatttgattttgatattccatatacttctctgtaacatcaacatcttgtttattagataaagtttccgctaaagtatttttctcagatttatttcgagctgatgctgaacttaaacgattttcgatcgaaccgatcttagatctatagtcagtaaagttttcagtaaatttatcgatccctgacaaatattcactggataactttctatctggatcccccgatttcaaagtatcgatcaaaccgctaaagaattcggtcagttcagacttgctatctttatcaatgccagacgaaccatcggcatgcatcaaacgtgaaccatcagtagctaaatctaagctgacaccatctgagatctcgcgctgtaaattatccacgttgcctctgtattctaaactgacagctgccccttcagcatctttaataacagcaaatggtggctcttgtgtctttgtccccccaaagatatacctgccatcatagttggtattcaaggcatcaactatccctgagatcgactgtgagatttctttacggttcgcattgtaaacggcaggtgtagctgttccgctattggccgacgactcgatcaaatttctaatgttaagcatcaaggtcgaaacattatctaaagctgagtcttgcgtttgcgaccagagcgtggaatcagaaattgtttggccatacgttttgttttgtgaaattgaaacattcagatctaagatctttgcgactaacaaaggattatcagaagccttattgacctctttcaaactagacagttgattcattgtcttttgaaccttgttagtactgatctgtaaattcttcaagaaatcagaatattccattttactggaaaccctcattgattaaacccccgttctattgatcaaagtatccaacatttctgaaacgacatttaacaatttggcattagcttgaaaaccttgttgaaatctgatcacatctgacatttcttcgttcaaattaacaccagaagctgcttgatctttgtattccaattgattcaacgctgataattgagcagatgccatattgtctgctttttgtttagatatcccattttttgtaacaatactgttgtaagcacctgggatcgttaaaccctctttagaattattgaaggtcaaagtatctttattataatttttcagcaaattcgctgtatcgaccggataaccaagcttactctttaaagctctagccatcgctaaagcacgtccattatctccttcggccggatcatcaccagtaccgactttcattttgcctggatctgcgactaaatcatcgttgatcttaatacttaaagccggatcactgagatcagtgatttcaaaaaagccgctatctggagtttgcccgtcagaataaacgatattttcaatttctacaacgcctttagcaaaatcatttaattcagctcgatggctttccacttcagccaatgattcttgcaaaccgccgatcgaacctgacttaactgctaacttgctatacttacctgaaccgttcgctgtttcaaaaacgacttctccgaccgtgaagtctccatcgatcgtttgctttggttgtgtttcatcaccatttggcaaaatctgagctttgccgtcagagttactgacaacaacatttaacttagtctgtactcctttttcattgtcaaccactgcatggtcaccgatactaagtgaagcacggccatatttgtcaaacgaaactgttaaattactttcagcagacatatcctttaataaactatcgcgctgatctaacaaatcattgggctgttcatcacttaaatgactgtcatacaactgttgattcaaattagcgagttgttccgccttttcattaaaatctagaacagttttcgccaaagaagaacgtgtatcagtagaaacttgtgaaacttgccgtgcagtttgctggatataagaagctaaagcaacacccatttgaacactattagttttagccgtatccaactcgggattgtcggctaacttttgtaagctgtcagcaaaattattcaattgtgtaatgagtccatcgtctgacggctcatgtaatgcattttctaataaagccaaaacatctgacttttggacgttaaaattgtaatctgaattagaatctcgaacctgtgaacgtacaaagtcatcaacgatccgtgagataccatcagcttgaacaccgctaccgatcaaaccgactcctgtttttgcataagggatcttcgttgataaatcaacacgttggcgcgagtaaccttcggtattagtattagcaatattatgactgctagtctgcaagccgatttggttagcatctaacccactgcgagcagtattcaaagtaccaaataaacctgacatgaaagtcctcctaaagaataacaaggtgaagtgaaccgcataaaagttgagcactatcggactttgacaataagtcgtggtttgcgacttgttggcgaagttggataggcacagacttttggttcacgcaacctgactaagaataacaaggtgaagaaatgcggttagaagccgagcattaacggactttaacaataagtcgtgcatttagcgactttttgttgaagttagttaagcacaagcttttgcatttcgtaacctgactaataacaaggtgaagtgaaccgcataaaagttgagcactatcggactttgacaataagtcgtggtttacgacttgttggcgaagttggataggcacagacttttggttcacgcaccccttctacaacctaaaatgactgatctacgattgccgcaggaatatcttctcgcttaggttgactttgagtcctatgctgatcaacataagtattttcctgtttttccaagctgtgttggatcgtatccatcatttttttctgataagccaaggcttgttgcgtcaacaataaattagtttcttgcaactcttggatttcttgaatcagcatctttgttttgtcgccaatttcaccagtatacttctcaaaaatcggtaagaaatcttccttttgcggaacaatttcatttagcgattctccgtcatcaagaactaaaaacttttgttcacgtttcagtattttgataaataatttaagcttagcctgaaatgccttttcattcatctttatttccttcttgtttcatttcctggaacatctgatcagcaatcttttctggtgagaccttatatgttccgtttgccaactgctgtttgattttgtcgaccttagccgcatccacatcatcgtctatatcacgatttttagcgttgtttactaatctttgagcagtatctgataatttaacattaaactgttgtggtgcaccctttttcgttgttttcgaggcttgattgtgatagtagttttggatcatttgtgaattgattgaagaaatatctcgattaattttcatgtgaatgcctcctttttcctttttgactctacaaatacagttatcggccaaaataaaaaaagttaaacctaaaagttcaactttttttaacttaatttattttattgatcctttgtttttgagaaatgatcttattgatccgcacgccaaagttttcattgatcacaacaacttccccagttgcgatcaattttccgttcaacatgatctccaaaggttcgtctgttaatttatcaagttcgataactgaaccagtgttaaagttcaaaatatctcgaacagtctttttagtccgccccaagacaacgcttaggtttaatggaatatctaagatcaaatctaagttatcaccgctgatttcttggtgactcgacaattcttcaaattcgggtttagaaatttccacgttactgacctgcgcctttctttgtggttgttcattgcttggtttttgcgggatcttaacttgttgcggagctggttgtggtttactaatagccttggctttctcgactgctggtttctccgcatcacgtttgacaactgttgctttgtcagacatcattgctttcacaatatctttgaccatttccaaagaaaagatctgcataatttcactctcgatcagtccttctacatccaagttaaatgaaatacaataaatttcttcctcacggtccaaagagtcttcattcacatcgccgggattttcccacaaatgcacttttggaggaagaatatcgactttttggttgatcatagtagccatggatgtcgaagctgaaccaatcatttgattcatcgcttcacccacggcacttaattcgacttcagtaaattcttctgaagctgactttccatcgccacccatcatcagatcagcaataaccgttgcatcactgacctctagcaacattaagttagttcctgctaaaccttcacgaaattcaacggtcgtagcaactttgggtgcatggatctggtcgagtaattcaccaaaatggatttttttaacacgtggtgtcgtaattgccacacgatgagtcagaattgatgacagagttgttgctgcctgtgacatggaaatattaccaacttcaccgatcaggtctttgaccccttggcgatctaacccctccaataattcttcatcatctgattgcgcagcttcttgagcatcactgccattcatcaaagcatctatttgttcttgtgttaaactctccgtcattcttcttccccctcgatcttgctcaataactcaattgcgaattgtccattctttttccctggtttgacccagtaaaacggtcggtcttcaatgtacgtatctaacggactggagattttagagtccagcttgatgacgtcacctggttctaatttcaagaaatcagccaagtccatttgggtgttgcccaaaacgacttccattggcagatctattgcgtttaacccgtgttttaattcgctttggtcatcttcacttaattcctggcttgagtcgaaccaattatgcaaactcaatttatctaggataccttcgaatgaaacataaggaatacacaagttaataaatgttgaaactccgaaaagctgtactgtgaaagtagctaatacaactggttcattaggtgataaggactgtagtaattgtggatttgtttctagagattcaagctcaacatcaagtgtcaggacttctttccaaactgattgcaaaattttagagaattcacccataacctcatctaataatgttaattcgatatctgtaaaaccatttttatccaaaggcggttgattttttcggttactctccaaatcagcaccaccacacaacaattcgactaaagtcatacatagttggggattgatttcgatcatgtgtgatcctttaaggggagctgctttaaacattccgatcaaagtcacacgtgggattgaatgaatgaattcgtcataactgatctgctcgatcgatgctaattgcatatccaagttagtccgcaagatatttgaaagaacattgccgctcatcttagcgaagtcttcaaaaatcatgtgtaaggtatttatatattctttagatagccgtgtcggccttctaaaatcgtatggcttcgcttgtgattcgtcattttgctcttcatcgatcacttcttcgtctaattcgcccgaatcataggcatttaaaagtgaatcgatttcctgctgtgataacacctgatccacaaagacacttcctctcgctcattagttcattccacaattaaaaaatcttatcattaacgtcgatcacatcagcaatcgtttgttcacccaagtctaccacaccggtaaaataaagggcggcttgatcttcacttagttgaatatcatcaggatcaacatccatcacttcgatcacttcatcgatcaataatccacgacgttcatcatcttttttcattatcataatatttcggtttgtttttgattccggcagtcctactaactgtgccaagctgatcaccgtcaacactgtgcctcgcaaatttatcaagcccttgacccaaagcggagcaagcgggactttggtaatttgaaccgtatcaacaacttcttctacagtttcggcagctatcaaataatgttgctgattcattttaaacaaaatcatctgcattaaaacacactccctttcttaattaaattcagtcaatagaactttaattaagacaatgccttatctaaggctttgatcacccgatcagtatcaaaaggtttgacgataaaatcgactgctccagctctgatagcatccatgaccattccttgttggcccatcgcactgcacattacaacttttgcactgctatcaaattccttgatcattttcacggcctggatcccatccacatccggcatggtaatatccattgttaccaagtccggtttctcagactgataaaggtcgaaggcttcttgcccattttgcgcttctccagcgacctcatagccgttcttttctaaaatatcctttaatttcattctcataaaaacagcgtcatcgacgatcaaaactttatttgccacgcgacattctcctctcaaactccaagtgattttatcattttgtcaattacacccaactctgggatgaagtatagtgaagcttccaagtaattagaatcataagtaaattcatttctgatcaccatgatctcatcaccaaactgttcaaattccatatatgcactactaatcacggcaccaaacatatcaaacgaacttaccggaacttctggttttaatttcttttccagcatcccgccgatcgatgttaaaaatgaacttgaaacaatgttagtcaattcactaactgcagaaaccttaatttcttcggtcacaccttgatctgttcccatcatcaaacttgagatctctttagcggccgggtccgtaataacaaatagcatcgcaccctttaagtcaccatggatgctgcttaaaacggcataaacttcctggtcatcggccataacttgctggtaaagctcgtcataacttaagatattgacttctggaacacgcatcctgatcacactgccaaccatttgtgatattgttgtagctgctttgccgccgccaatattcataacttcttttaacgcatctaattgtatgtttgaatatgccatcttaacccacctgtgcgtctttacagatcgtattgacgtccaagatcaatgcgatcgagccgttgccaaggatcgtcgcgccttggaatcttttgattttttgcaacatcggatcaatcttcttgattacgatttcttgctgtccgatcaattcatcaactacgatcccaaagtctttattatcacccttgatcaagatcatatatttctttccctgatccttttcagggatattcaaaatgttggcagtccggatcactggtgtcaatcctgtctgtaaaggatagacttcctgactagcagtttgtaaaatattatcttcatggatcatttcgacccgttcaacaacatctaacgggatagcaaatgtttcttcgcctagtttgaccatcagtgcctgaataatagacaaggtcaacggtaatttgataactgttttcgtacccacattgactttactgtcaacttccaatgaaccgcccagttcgttgattttagcttgaacagcatccaagccgaccccacgtcctgaaatgttagtgatctttttagccgttgaaaagccaggattaaagactaacatttgcagctctttatcactcataccggtcgtatcgattccacgctcttcagcggtaattttaaggacttgtggatcaaggcctttaccatcatcgctcaaagtgatcatgaccttatttccttcttgataagccgataattttatctttccttcttccggtttgccaagtttctttctgttttcagcatcctcgatcccatggtcggctgaatttctaactaaatggatcaagggctcactgagttcggtaaccacagttttatctaattcagtttcttcgccctcaatttcaagagtcatctttttatttaactggttggaaagatcgcgaaccatccgtggaaaacgactaaagacaacgctgacttgctgcatccgaattttcaaaaccaaatcctgcagttcagatgtcaagcgtgaaacctgttctaaagattcatgcacttcttctaaattttggcgactattggcatcttctagttgattgcgataaacgaccaactcagatacaacattcaaaaaggtatccaaccgagaaagatcaactctgatcgactgatttttggcatttttttgatgcgaagtgctcttcttagacggggcttttgctttcttaggttcaggagcagcgctttttttctcagtagtattttctttgtcaacagctggttgtgcgtctttttgtggttcttcagcggctgccttttgagttttctcatcgaattctgccgtcaaaacttcagcgatctcactactagattcaatgatcttcttaatgtcatcttgattactttcagttaggatcaacaatttgaaatctgtatcaaaattgccttcttccagctggtcaggagccggttcagtgtgaataatatctccttcactgtcgagcttatcgatgactaagaatgctcgtgggcctttcagcattgactctggatcgattcgaactgccgcactgatcacattaagatgttgtgttttagcctgttcgatcgctgataagtcagcttcttctaaagtttcaaatttcagttcgagctgactatcttctggagctttcttctcatctacatttttatcagcggtttttgtttggccgccatctaattcattttcaactttatctaattcattccataattctgtgatctgatcttcgctttgttcttcttcatctcgcaagccgtctagaagttcggtcaatttatctaagcaccgaaaaatcagagaaatatgatcacttgttaccttcaacttgcctgatttgaaaagatcaaaaatatcttccattttatgagtcaacttgctcatgacagtatatcccatagttgctgacattccttttagggtatgtgcagctctaaaaatttcattgatcaaatcgatattgtctggttctttttcaagttctagaatattatcatttagttgtgttaaattatcttcgctttcttcgaaaaagatatcgcgataaacactattatcgtcagccatcaatgatccccccattcaaattatttacacctaagcacgaatggtctgtgcttattgttaaagtccgctaatgctcgacttttaaccggctcactccaccttgttttcttagtcaggttgcttgagacagaaagctccgcctatccaacattagttccacatcgcaaaatacgcaatctgaatctagtgtccgatagtgctcactttctcccgtctcactcaccttgtttctcatatataaacgactctattttctttaaccccagcttttctgcgctgttaagtgtttctgttgctcccgtgaacaatattccacctggtaccagcgcctcacttattttttgataaactcgatcgcgtgccatgggtttgaaataaatcgttacattgcgacaaattatcgcatgaaaacctgattcatactggtcagccaataaatcatgtttcttgaacgaaactcgttgtttgacggctggccctatttgatactggtctggtcctaatgacttaaaatatcgtctaacatcagtatcagaaacattttttaactcatttgtcgaatactgacctaaacgtgctttctttaaaatgtcatcatcaatatccgttgctagaacattgcccataagatgatttttttctaagatcatcgctaaggtgtatggttcggcgccggtcgaacaagccgcactccatagtttcaaattattaaattgtggagcaactttttctaacaaacatttttcaaaattactaaatatttcttgattgcggtaaaattcagtcacattaattgtcaaatgctcgataaactccgctcgtttgattggatctttgtccaaaaggtgttcatattcatgcaacgagttgaccccgtttttatccataatatttttgatcctgcgttgcatttgtctttctttataatcatcgagatggatatgatatttctgctccacccacctattaaaatcagtaaaattttcttccaacattttaatttcacccaacgatcgtctgtagtattttcccgatctcatgcaaacttacaacttcatcgacaacttgagcttcaattgcagatcttggcattccaaaaacggtacaagattcctgatcttcagctattacataaccgccttcatccatgattgtttgcaatcctgccgttccatcatgccccattccagtcaggataaaagctgttaaattagcaccataatgagcagccgccgtttcaaacaagtaatcaacggctggccttgtcccatgcatcttcggacgttgatctaacttgagccggtcaccttggatcgtcatgtgataattaccaggacacaagtagatctgatttttgaccagcatattatcactagcctcaacgactgtagcgccgctttcttcatttaaacgctcagaaaacgtgcgggtaaatcccgctggcatatgttgtacgataaaaacaggaatgtttgtatgactcacacctttaataatttctaatagtgcttttggtccacccgttgatgagccgatcacaacggcttggggcctgatgttacgctttttatgtgctccgttgggtttggctttatgattggcagcaactggcggtttactagaacgtccgcaaatatttttgatctttgcatacagttctctgacccactcgtcttgaatttccatcaggttcacaggtttttcgataaaatcggccgcaccatattctagagctttgatggttactgcctgatcactgactgcacttagcattatgaccgggatagaataatcctttttgatctgtctaagggcgctcaagccatccataacaggcatttcaatatccattaaaattaagtcaaaatcattatctgcatcaaggatgtccaaacaatttttaccgtttcgtgcaattcgaaccgttgaaacactgggcattttattcaatatatccgagatcactttgcgcataaatgcagagtcatcaaccatcaaaatcctattcataaggtataagaatcctttcacatctttacttttctctcttaaacaacattctcaagtcatcaatgagcaaattttcgttaattaaaaaacagtacatagtttttaaatgtatctattttcctgtctcacgaccctgatcaaggtcgaaaaatcgtttaaatcgacgaccatggtccttccgctgctgccgcccgtatcttggccaactaacgggatctgcaggcttgccaactgatttaaaacagcgtcaacatttctctgaccaatattagctgtcgtgaggttgtttttaaatccaaacatatttgcaccaccagagatcttagcttgaaatttagctcgtggtgctttttgcttaagttctttgaccatcaggggtaacgccgtattggcatacttagccaagttcaaacctgaagtcccgttcttttcaaacggtttactatcagggagcataatatgactcaatccaccgatttttgaaactggatcataaacgatcgttccaatacaagaacctagccccacggtcattattttattaggcgcgtatgaaattttataatcagagattcctaccctggtttcgttagtgttctgcagcatcatccgtattctcttctttttctgaattttcagtaatggaatctacggatgaaatgatctcctcttcttgtgaagagttgaaaagataatctaagttcaactcgatcactacttcatcgcccatcttcaaaaattgactgatatacgggcgcttcagtgatgatctgtccaaatctttttcataatccgtctcagtcagcgacatgatccctacgatctcctcgacaaagatccccatcgtccgttcgctccaatgtgccaagatcaccttatagtccagcgttgcaggcgataattcgccgtaaagccgcttactaagatcaacgattggcaacatctgttcttgatattcatacacacctaatacatagtctggcaattccggcaacgagataaacttttcagtttcgatcactcgtttaaccatttcaactggcaaagcaaaaacttgcttatgacttttaaaaacaacatattgtcccatttttgtacccctctttaacttctacaactaagaattgacgctgctagttttttaatttgaaactgccgatttgcaaacgtctgatctcatcagcttgttgaagctgttcgacacttttttcgagttcttcgatcaaggaataaaaatcatccaagttagccgatacttcctgtgtacttgcagaagtttcagcgatctgtgaatccatttgctgaatagaattattgactgcatcttttttatctttgatctcatctgcatgtgaactaacatcggttaggccatcgctcaactgcgtgacatcctcggtgatttgttcgctagccttcagtacaccagaaatattcatctgctgttgctgactgcccttgtatgatgcatccagatcaacagtcattttcttagacttagcacggatcgattcgatcagttctctaatattagtggttgatttgccggattgttctgccagatcacggacttcctcagcaacgattgcaaagcctttacctgcctcgcctgcacgagccgcctctattgaagcattcaaagccaacaaattagtctgttctgaaatatcattgatcaactgcacgatattgccaatactttgaatatcttgattcatcgccgtcatttcagaaacaatcttcttttgactttctgtttcttggttccaagaccgtgaaacttggcgcatcatttccatgttttgaatattactttgctttgattcgtcagcatagctattcattttttcaattttctggcgtatctcttcaatttggtcaccaaaaacattcatttgagcaactgtactttgagaagctgttgcttgctgtccagcattagtagcaatagtccccatcgcttgacggacaccatcgatcgaacttttagcgtgcgtcgattttccacttagatcgttgaccattgtttccgactgctcagtttcttccttgatcccagttaataaagctgaaaatgcattggctaaaccaagcaactggtcacgagttttaataaacattgggctttggccgggaactttgccgatctcgtcgatctgactgaaatctccctctaccatcttaccgacctgaacagaaagtttttttaatccgccggcttctcctcctgttactgccgtatttttatgaccaaatagtacatacaagagatgcaaagcgactacaatgaccgcgagtatccaaaaccttctcatctccgctgtctgtgccgaacttaaaacaaaagcccgaaaaacaattaaaacaatgactgtccctaaaactggcaagaaagctacttcggagttagcttttttagccgtcttcttacgtttttccatttgttttccttccccatataaaagatttggtatctgtcataatactcacttaagcaaaacgacactccaatctgttatatcggttaaaattttatttttttaaccgtttaccaaacatagacatcttttggatcagaaaatcttgaatatccaccgtctggatcatctcggatcagttctccattttttagttccaaagttcgatgacgcaaagaattaaccatggtactgtcatgtgttgctaaaatgatcgttgtccccatctgattcaggcgaaagaaaatttgcatgatctctttggccgacttaacgtctaaattagcagtaggttcgtccgcgataataactggcggatcattcaataacgcacgagcgatcgcaattttcttttgttgcccgactgaaagttcctgaggcaaccgctcaataaatagcatcatttcgacactggtcaatacctctgccatccgctcttcccacttttcagtggggatctctagcgctgacatacaggtttccatattttctttgatcgtcaatcgcggtaaaaaaaggtctttttgcgaaacgatccccaattgacggcgtagtttgtatatctgttcatttctcaaatattcaatttcaatattgccgatccgggctataccagaatcaatggagcgttgagcacttaagatctcaagtaaagttgttttcccagccccacttggaccaactacataaacaaattcaccttgttcgatcacgcatgaaatatttttatttgcccaaacattgccatatttttttgttacatttttaagttcgatcaattttttctcctaaatcagtcggtaaagtggttgatggtctccatcatttcatctgtagatgaagcagcgcgggcattcatttggtaagacctctgtgctgttaataattctgtcatttgagtagccagatctacattggaactttcaagagttccttgcatcacactactacctgccccagcggctctaaaaccgccattggctaaatacaagttatcaccaactgacaccaatgaatgtgcgttgtttggttcaaataaacgtaaagaccctaaaacctgatcaccggatctgatcgttccgtctgaagaaactttcaagtcccctgctggccaattttgttctggcacccgcgcgtcaactgcaacccgatagccgttgctggcgatcaaaccaccgttagcatcacgatgaaagtctcctgccttagtcaagtatgtattaccatcgggaccaatgatcccaaaaaaagcattgccgttaatagccatatcaagtgcacgaccggtcgtttcaaattttccgacttgatcatcgactcgtgctcccgcggcatttagaccagtattcgaatcaactcttgcattagaattaccaagtgcaccgtcgctattagttaaattattattcatcagctcattaaatgaattgatgattcccttatagcctactgtgttttcgttagcaatgttatgtgaaacattatccagattattttgcaagccgttcaaacctgttctgttaatggataaaatagaattcaagttcatttttacttactctcctcatttcctacatgatctgttttctcaagcctatactaagtaccatcaagactcactgtacgcctgagaaaaataaccaactatttgatctagatccgacctagttggttgactgccttatccaaggtcgaattagtagctgatagcactttttgttgagcctgaaattggcgcccggtttccattaatgagaccatctcatcagcagtagaaacattagaattttcaagcattccagcttggaccggcaaatcaatttgctgggctccctgcccggtataaagcgttccgccgacattttgaagttgtgcatttgctgggaaagacaccaccatcaaattttgttgtgcttgctgggcatcaactgggccgccatttcgacctatcacttgaaaaccttcttcagtgatcagctgaccggcatcattcactgaaaaatgaccatcacgcgtatacgcgatttgaccatttcccattctaacggcaaaaaagccattgccttgaactgcaaaatccgttgccaagcctgtcggttcaagcgagcctttttgcatgtccagagcactgccctgaatttgattgccccatgtaaaaccgccaatctcatggcgggtttcatttttgggaccagcctggttattatgtaactgtgcctcgttcattgttgcttcaaacaaatttttttgcaggtagccaggtgtcttgatattagcgatgttaccgctaatattttcttgttgagcttgcaaaacattaaaactatgtcttaaagtatcaattcctctaatcatcattttcctccataaatccttttagttttccaactgcacgcccatggatctgtgaaacgcgtgcaatagaaacgtctaagaccaaactaatttctttaagtgtcatttcctgttcgtaatacaaactcaaaactaattgttctctttcagaaagcttgctgatcgccgctgccaactcctgtttcatttctgtttccaacaaatgttcttgtgcatcgcccgtttttttatcacgaaagatctcttgtctgctaggcgattgttctgctgaaaacaagacatcctccaaagagatactagccatataatgcaagctatcataaatatcgttcagctttttctgattgatttggagcttactgcataattctttgtcagtagcttctcgtttcaattcttgctctaattcctgcttagcccgataatagcgagtcaaattgtcaaatttataacgagacaaccgaccgtgactgcggatctcatcaatgatggtcccacggatccgtacataagcataactttcaaatggtactttcttttgtggatcaaatttcttaagtgcatcgatcaagccgatcactccagtattgaagagatcttcgtagtcataatcggagcttttaacagtgatccgagcgatgaccttttcaactaaaggcaaatatttgataacttgatcttccatattcatctcatacaagaaaaaagctcctttctgaaaataccgggtgaagtaattgtcttctatccttgttcctgcaaatatgtgttgcaaattggaatgtgacgcttactttggcatagtttgtctcacaaatcagaatgtaacgcgtactctggcatagtttgtgtcacaaatcataatgcaacgcatactctggcatagtttgtgtcataaatcataatgcaacgcatactctggcatagtttgtgtcacaaatcataatgcaacgcatactttggcgtagtttgtgtcgcaaatcgaaatgtgacgctttctctggcatagtttgtgccacaagtcagaatgtgatgcatactctggctatgtttttctcacaagtcagaatgtgatgcatactctggccagctatcttcaacacgccttcccacagagtgccttcctaaaattgcaactgcccgactgcctcgatcccgatttcatttgggatctcatttaacgacaaaattgccaaatctgggaagttaaacgacaacaactttctaaacgcagttctagtctgtggatttgtcaaaaggacaaaggaaatattttccaccagcattttttgattcagctgagtgatcgcatccaacatcttattgaccgtatccggctgcaaaacaggatacgaaccagttgctgtttttttaatactctgtgcaaccatttcttcaattttgggatgcacagtaacggcataaattttgttatcttcaccgacatacttgttggcaattgttcttcttaatgcttggcgaacgtattctgtcagcgtttcggtatctttggtgacggtcccataatctgccagagtttctaagatagttgataaatcattgatcggtaccttttcttccaacaaattctggaggaccttttcaacttctcctaagcgtaaaatatctgggatcaattcatcgatcacaacgttgctttgttgcttaatgccttccaataattgcttaacttcttggcgtcccaaaagttcaggagcatgtgagtaaataacttccttcaaatgagtggcgataacagtcaaaggttcgataactgtgaatccttgcaggtcagccgcttctttatcactttcattgatccacatcgcttctaaatgaaaggctggttccacggcttggatgccattaaacgggatctcatccccagtcggactaaagatcatgtatttatcaggataaatatcacccgtgccgacctcattgcccttgatcttgatagaataattatttgcatccaggtacaagttatctcggatcctcactggactgaccaagatccctaattcatgagcagtttgtttacgtaaagcaatgatccggctcatcaaactattgtcgatcgaactatcgaccagcggtatcagtgcataaccaatttcgatcgctaaagtttcgacttggaaatcggctacatcttcgtcttcttggacatcttttttcttttgtaaagccaaagtctgttttcgttgttgctcttccttaactttcttagcatcctgttgtttgatcaggaagctaacaccaagtagggctaaccccataaccataaagggaataaacggaaaaccggggacaagggataaaaccattaagatccccgctacgatccggaatatttgcggattgcgcaacgcatcttcagcaatatctttaccaaacgtactatcattatcagagcgagtaacaataatacctgaggcaattgagatcaatagtgaagggatcgaactgaccaagccatcaccgatcgacagcttgccaaactgtgataaagcttccattgcgctgagatcacctttcatagtaaagatgatcgttccaccaatcagattgactaaaacaatgacgatccccgcaatggcatcacctttaacgaacttgctggcaccatccatcgaaccataaaaatctgcttcacgttgcaggtcttcccgtcgttttctagcctgcttttcatcgatcaaacccgagttcagatccgaatcgatcgccatctgtttccctggcatagcatccaaggtgaaacgggccgacacttctgaaacacggccggaaccgttagtcacaacgaccaactgcacgatcatgatgatcacgaacaagatgatcccaacaatatagtttttccctgccataacgtcagcaaaggcggcaataacatgtcccccatcaccttgtgttaggatcgcacgagtcgatgacatgtttaaacctaacttgaacatcgttgtgatcaaaagtaaggttggaaaagtagtaaattccaagactgagtgagtaaacatggtgatcaataatatgttcatggcgatcgccatgttgatggttatcaaaaaatccaagactggcagcggaagcggaatgatgatcaaaccaatgatactgaccaccaaaagtgaaacgatcaggtcagctggtctgagtgcattcttcttagctgctttttgcttgtttttcatcagttactctctctcctatcaactcaaatccggttcaactttaaccagacttatattttatacttagcttcttcatccaaccggtagaccaaagcgatcaaatcagcgactggctcaaaaaactcttccggaatgaattctcctgcctcgatcttgagataaattgctcgtgccagcggtttattctcaatgatcggtacatcattttttctggcttcttctttcattttcatggcgacctcatcagctcctttagcaagcagctgtgggactggtgtttctgtcttatcatacttgattgccaacgctaaatgagtcgggttcgccaaaacgactgtcgcatctttaacttgggcgatcgagttccggaccatcgcctgatacttagctttccgctgcgctttgaccttcggatcgccttccatttgtttcatttcttctttgatctcttgtttagtcatcttcaatttcttagtccgactgaaactttgataggcaaaatctgccaaccccaaaaccaacaaaaccaaggcaatctgcatccctagttctttacaaaaattgagaataaaaaacaagatcttggcaggaccaacagaaccagcatttaaaatgtcacgtaacgtagatatgtatttgcgataacacagatatgcgatcagtaagaactttgccagcgtttttcccaggttgactatcgcatccagactaaacatccttttgaaaccacttaaagggttcaaacgtttgaaatcaggctttaatggtttagccgtaaataaaaaaccaatttgcacaaaattccccaaaaaactgatcaaataaccgacgaccaaaaatggtgctgccacgatcaaaaccgttaagatcgcctgcaagccaaccttaggtaggtctgcgtataagacctggtagttatccaactgctcgataaagcctgtcatataaggaaaaaacttgcctaatccaaattgccaagcaggaataaagataaacgaaaaggtcaataaagccaaagcagctgttaagtctggacttctagcaacatttcccttcttgcgcgcatctcttttacgcttaggggtcggtttttcagttttaccatctttatccatgaaataacctttcctttatcagactatgcctgacctaccgaacgcaggaactcgactagatactcatatgactgtgggattatctttcccaacaattccacgacatttggcagcatgatcaaaaagatgatcattcctacagtagatttaagagacaaacttaacatcagcacgttcatttgcggcacagaccgtgacaagatccccaatacaatatcgatcaccatcacagcaatgatcaaaggtgcagcaacattaaaagccatggcaagggtcttactagtcaaaatgaccacacccttaacacttgcattcgtcaaagtggcggttcctaaaggaacaatcgtaaaagatagcatcacagcgcgaaacaattccagatgcaaatttaacatgaagaaaactgccagtgccaaccagtagtacatccgaccaaattgtgaactggaaacttccattgtcctgtcataagcctggcccatcgaaaaaccattttgaaaatcgatcagggaacccgccatgatcacagcttgaaaaaccagttgactaacatagcccatggcaagccccaataaagtctcctttaaagccgccaaagcgaagataaccacactcatcgccttgaccttgccaactaaaggaatggcagcaactaccaaactccccccaacgatcagcttagcagtattaggaaaacttctttgtgataaaatcggcgctgtgaccataaaagaaaatatccggcaaatcaccaaactaactaattgtacttcggccactgacgtcacacccccgagatcaagcggaagatatattccgtgaattcttttagcgttgtgatcataaagtttccagccaagatcagggtcacaaaaattgcgaccaacttagggacaaaactcaaagtttgttcttgaatctgggtcgtagcttgaaagatactaatgaccaaaccaacgaccatcgcaactatcacgattggacctgaaactactaagattctgatcaccgcttcacgcatgaccatcaagactaatgaaacagacattaagctccccctctaactgaaactatgaactaacgattcgactaacaagtaccagccatctaccatcacgaataataataatttaaacggcaatgagatcataaccggcgacagcatgatcatccccatcgccatcagcacactcgagacgaccatatctatgatcaaaaacgggataaatatcaaaaagccaatactaaaggctgtccgcagctcactaataataaaagccggagtaagtgtcgttagcggaactgactccacatttttatagcgatgcttgtctttagaaacatctaagaacaatttgacatctttttttcgagtttcttttcccataaattccttaagcctgacctctgaacggttgaatgcttgtttttcagtgatctcctgccgactataaggttggatcgcttctttatagatatctgtataaacaggcttcatcgtaaacagggtcaaaaacaaagccaagccaagcaaaacttgatttggtgggttttgctgcgttcctaaggcacttctagtaaatgaaaggaccatgatgatccgtgtaaaagatgtcatcatgactaacaacagcgggaccacggataaaatcgtcatcatcacaaacacattaacgatctgcgacgaatttccgctctgtccactattgatcaaatcagtaatgccacgagaaacatcatcgaggccagctgcatgcactgaaactggtcggaacaagcaagccgttaaggacaacccgctcagtattttactttgctttttcgtagtcattacttctttctcttattctgcagcttgatcgtcttttgcttgagaatggccgcaaaatctattttttcactcgcttgatcatctgaactggtaaataattgctcaacctcttcttttgataactcagagatcaccgtactgccttgttctgccaagctcatcaagtaatagcgctcgatgacttgcacgatcccaagtgcggaagtttttgaaactgggattttcttgataactcgaaattgccgatcctgtggagcaacgaatttctgtaagtattttaaaaataagttgatcaaaacgatcacgataattaatccaaccaccattttgatcaacgacaacgttaactccatttgaatactcctcgtatgatttaacttattggatcacaaaatctgtcacataaacttcttgcactattgaactgccaaaatttttattaatagcctctttgacttgttctttgacctcatcgatactttgattatttttcaataaatctgcggccctttttggtttcaaaacacggatcatgctgtcacgcactaaaggcatgtctttttttaatgcttttgcttgatcatcgtcagccactaacaaagagacctttaagcgtaaatattgtggatcagctgcatcatccgttgccaaattaacaataaacattttgacgtttaccagacgctgtcttttagaaatggcagctcctgtttgcactttttcagctttaggttttgcgtcttgactattaaagtacttgccgaaaatgatcgtgccggcagcactagccccaaatgctaaaacgactactaaaacaataagcaatccccatttgatgccacctgctttagtttcagttgtttctacttcttcattcttcttcattgtttccctcgttattcccttcaaaaagattctcaccagaaaaaattcggtgacgatattctatgatcgcttccctaatttcaaacgctgtgtctctaactaccagcgttttcccatcgacaagcgtgattactgtatctggggtttcatcaattcgatagatcaaatctgggttcaaataaaattcttttcctttaaatgaagttaacaaaatcatgaacctgccccctattatttatcctgtacataaaataaaaattttaccttacaggttctttttccccttttgatcaaattgctgcgctcactattctaggacagctcctcaagccaggactttccgtctaaccaacttccacacacaatgctaaaaaacgcattatggcctagaagtccgttagtactcgagtcctacccggcttacctcgctcactatcttaggacagctcctcaacgcaggagtctgcgcctatctagtttaaacatcacggtgccaaaaacgcaccatgatgtctaaacccgatattgctcgtctcctaaccgcgttgtttcgctcactattctaggacagtttctcaacgcaggaatctgcgcctatccagtttaaacatcacggtgccaaaaacgcaccatgatgtctaaacccgatattgctcgtctcctaaccgcgttgtttcgctcactatctctttaggttgatcaattcttgcaacatctcgtctgacgttgtgatactccttgcattggcctgatatgctctgcttgtaacgatcatgtcagagaattcttgcgctaagtcaacgttagaatcttccaatgtccccgctaataaagtgttggtcccatctgtaccaggtactaaattattggcattaccagaatcctgtgatatttcataagtgctgttaccgatcttgcttaagccggctggattactgaacgtagcaatcgacactgtaccgatcacttcatcttccgcgccataacgcgcagtaactttgccatcaggaccgattgaaacgtgaccttcaactaacttttcaccagctgcattttgagctggtactgtaattggagttaacgctccgccttcctgtccgggagcatagcccatcacacgtaaaccatcagcattagtcaagttgccattagcatcgatcttcaaagcaccgttacgtgaataaacctgaccattattaccatctcgctcaaatactaaaaacccgctaccattgatatataagtccaaagcacggccagtcgtgttttgaataccttgacccatgtctgtatcgatcgcaccgacctgaaccccaagtccaacttgcttaccatcaataccgccaacggttgcacgtggtcctgaagcattcgcagttgtctgacttaaaatatctgaaaagttagcacggcttgacttgaagccgatcgtgttcgcattagcaatgttgttggaaataacatccaacctggtttgttgactcttcattcctgaaacacctgaatacaatgaacgtaacatttaaaattcctcctatttgtgtagcatctttttaaattttgctattttttaatcttttggttctctaacttctttgatggcacccatttcatattccgtaccgttgacggtcagcttggcaataccgccagtaaagttgactttatcaactcttccttgcttttcattgccttgttcatcaacaactgtgacattcttgcccattaaattgaaagcttgttgttgctgccctaaaagcaaagaattattcatcattgtcgacatattatttaattcctgtaaggtagcaaattgtgccatttgtgaaatatgatctgtaccactgctattggaatctccatctccggtcatggaagggttagacattgatgtcgctaagatcttcaaaaaatcatccattgaaagtcccaaagcatttttagcagcaccgttttgtgaagtactttttgttatctcactcgaactgccaagactgtttgcttgtacaccgcttaaattgtccatgaaatatattcctcctttgatcacgcatactctgagacgctcaaaccaacaaactgatcgttccgtgcttgatttgttcttcgcctggcaaatgttcttcactgaccacttgtgtcctcgtcttgtgcgaacgtgcaaatcggcgttgctgttcttgctcattttgcatgaaatcaccagctggaccatctcgctgctcgcctaaaagttcagaagtttccgccgtttgtctcacagtttcaacttgtttcaatgttttagtcgttggatcaagctgcagctgctccatgatctgctctaatttatgtgtgattttttgtaacatatcacgtgcagtactattttgaacttcaaattctaggctgactgcctgttcattcgtctttaccgcaactttcatctcacccagattagccggtttcaaattaaaaactatgctctgggtattgcccttactggataacaagcttttctcaactactggagtaagtgctttttgcaaatttctcacgacctgctcgaccggtctagttatcgttgttactttttgccccacattagcttgcgtaactgtcgcgcttttttgttcaactacgcttaccatacacgttctatctgtaagctcactaaaatctatgatttcagctgcttgtttttgtcctgctagcgaagctttcgtaccgatcaagatttttgaactaactgataaaatttccgctgactgttttagcgacgatactgaaagctcgtctgccatcgctgcaacttcaggtgatgttttaatttcttgtttacccagctgccctgctttagaaactaacgggctctcaatgatccttgtaggttgaaccgactcaacttccagatcagtctgctgagcagcttcctgcttgatctttgtgtccgaactcacaaccagatttattgtcgagttagattcttgaatagcctggctttcaccagctgacttagaagttaccatactaacaaagtttgctatctgttccttcaaggtcgcttgctgggttgcagacatttcatccaagtcaattacgctttgtgccggattttcgccaaattgctcggtttgttgtggtgcaacgtcattgtctgcaataatttcggctatcggtcctgccttggcttgctttaagtctagtggaggagcagcatccttaggtaatttttcattttttccggcgttatcattttcttggagcggttcgactgcttctgattggtcatgctcgatctctagtaaaatattttgctttttcaaatgatcgctactgctaactaattccttgagtccttccagcaaatcaggcgatatttggacttttccttgcttgaccaagtcatccaaagaaactgtaccgtttactaactgttggaacgttttcgagtcaatttgcaagacttgctctagctctttttttgtttgcgaatcagtagttttaatatgtttgttaagcatgtctttagaagtctctagtcgatttttagcctttttttgtctgaaacctttatcatcattaaccgcaatttccggcttatcttgtgctaaaaaagcctgaaatttccccgtttgttttttggttggcttggctttagcaacctgcaaaccagcaattttcttacctgtaactaccttttgcatttcattgtcctcctttcaaacccttgctttaacgtcaaggtcaagcgatatttacattttgttgtggccggtgaaaatcatccaactgcttttgttcctcatgggctagctccttttgatattgtgcaagctgctttgttttaagccgctctaatattttccgttgtttctgtgcttcgatcaattcactgcgaatttgctctttttgtgcttgcaaccccaacagttgatcgtgacaaatcatgatctggtcgttaagagcttgaatatagcgtcgtgtgacttgcattctgctaactgaaaattgtggagtttccatcatgctgtctttttcttgcatgacttgatccaattcagtatttttctcgttttccaggcggttgacttcagcaaaatgccccttgacctggtcttcaacttgcaaacgatattccagcactttttgtaatgaaaaattaaattcttccatccctgatctccctacccttctgcagtgatccgaccgtcacctaaaacattattcgaagcaaacaactgctgcaatctctcctctgtatctgtgaaacttgaaaattcatccacggcttgttgcaaaaagtcatcgatcggtttgtgcagctgcacagcatagtcgatcacaggatttgttccgctcttatatgccccgatatctatcaaatctttcgcatcagcgtatgttttcaaattttcacgcaattcactggcatggatattatgttcttgagagaccaacgatttcatcaaacgactgacactaggttgaacatcaactgccggataatgattttgggccgcaatttctcgcgataaaataatgtgcccgtctaagatcccgcgaactgcatcagcaatcggttcgttcatgtcgtcaccttcgaccaagaccgtataaaatgctgtgatcgaacccttgtcagacattccgcttctttccatcaacttgggtaattcggcaaaaaccgaaggagtataaccccgggtagttggcggttccccagttgatagaccaatttcacgttgagccatcgcaaaacgtgtgaccgaatccatcatcaaaacaacttttttgccctgatcacgaaaatactcagcaattgccgtggccgtatatgcacctttcagccgaactaagggcggcatatcagaagtagcacacactacgatcgacttagcataaccttcacccaagtctttttcgataaattctctcacctcacggccacgttcaccgatcaaaccgatcacgatcacatcggcctgacaatacttagcgatcatccccagcaaagtacttttaccgaccccactgccggcaaagatcccgactcgctgtccctcgccaaccgttaataatccatcgattgctcgaataccagtcggcatgattttttcaatgtcttgccgtttaaatggatctggggcttcctgcatcgctggatacccgaccatttcagactggtcaagcttggaacctttcaatggacgtcctaggccatcgaaagtatgtcccagcatttttggcccaaccttgacttcaagtgtcttgccagttgcagccactaggcaacccggcgcgatcccctctagctcatctaatggcatcaataagaccgtttgtttaacgaatccaacaacctccgtcactgtcttttttcccgcttttttcgcatagacctcacagacttcaccgacgaaggcttgcaaaccttcgactttgatcacaagaccaacaacttcgctgactttgccgtataccgaataaaaaggatattttttcgcttggtttaaataatttttaaaggggatctttatctttgtcatttatttacctcataattgttccagaaaaccttgtaattcctttttaatgtcaatatcaactaccgattcgtttgattcgacacgcagctgcaaagcatttaaactatcatcatcaaaaattatgtaacgcagatcaggaatttcttctttgacctgctctaacttagtggtcagtgattcatgataagcggagttagcccagaccatcaatacttcatttggtttttcgagttcgaataataatggactcaaaattgcagtgatcttttctggcgttagttccaactgcgtcttcaaaataatttcggccaactgtactgcaaaagaagtgatctcatcctgtttttctgccaggtactgttttgactctgccagactttgctccacgttatcttgtgcctgcttgactagaggtgccattttttgttgtccttttgtcacagcctcctggtatccatctttttttccctgagcataaccagaatcataggcttcttgcttgatttctgctgccttttgttttgcatctactaacatctcagctttcagctgttttagcttttgctggtaagctgccgtctgatgtgctaatttagcgtcaagagctgttaactgtggatcttgcttttttatttgaggaacaaaatctgctgtctttataccaactttcttaccatgcaggggcattgcctgctgtttcaaaatattattagacaatgctgtcttgacctcctcgaccaatatagatctcgcctctttcgtctaacttccgaataactgcgacaactttttgttgtgcttcttcgacagctgataatctagttggacccataaattcaagatcttctttgatattttcaaccgcatgttgtgacatattaccgaagataaagtctttgatacgatcatcgctgcctttcaaggccagctctaatacatcgtttgtcacatcacgtaatactttttgcacatccaacgcttgcaaagtagtaatatcttcgaaagtaaataggttggcctgaacttcactggccaattctggctgtctgctttccagaccggccaagatcgtcttttcagtactgcggcccgttgaattcaagatatcgaccaatgcgccgacaccaccgatactctcacgttcaccatcaaccacattggaaaacttatcttccataactttttcgatccgctgaatcgtttctggtgaagtggccgaaatcgttgccactcgttcagctacatcagattgcaattcatctggaaattctgacaaaacactggcagccttctcagcctgcatataacacaatatcaaagcaatagtttgtggatgttcttctactagcaaattaactaattgctgctcattagcacgacgggcaatgttaaacggttgttcccgcaactggatcgtgttcaaaacatccagaacttctttggctcgttgcggccctaacgaattaactaaaagatcctttgcgtagtcgatcccaccatccaaaacatattgtctggctgtggcagtgtcgacaaattcatcgatgacagcattcttttcttctggagtcacataatctgtattagctatttcataactgactttttgaatcatactgtcaggtaaaagtttcattacctgggaggacgcttctgaccctaaagagatcattaagatcgccgctttttttactccactcaattgagccatctcttatttcccctcctagtgatgatctttcatccaagctttcagcaattcagctgtaactgctggattagtctgggcataatctttagcctgtttatccttagcttgtctttctttgacttctggtttttcctgcagaggtactgctttttcctcttgttttgcttccggtaacggctcactattcgctgaagaagtaggtccaggttgtggtgaatcatcagttacatcgacatcataatcatcatcgtagtagtcatcatcgtcatcttggcgtttcttgcgaatgatcaaaaaggctgcgataccagcgattgcgatgacaccgatcggaagggcgatgtaccaccacggcacattattcttcaccgtcttagtcttatgaacttttggtgtcgtgtctggaacatctaaagcttgaacagtaactttatcaccacgatccttatcgtaaccgatggctgaacgcacaatacttttgatctgcgcctgctggtccccactaacatctccacgaatagcaacagaggtcgttaatctcttcacagttcccggtgcgctaacttgcttagtcacatcagtatctaattcattattgatcgtccggctatatgaagcgccattatcggtattatcgccagttacgttagagacattatcatcggtttgaccagtctgtgcttgttggatctgttcttggttcccattagcttgaacattttcactccgtaaatttggattgctatatttcgtagtcttgcgttccagtgcgtcaaaattaaggtcagcgttaactgcgacgctgattttgtttccatcagctaatgggcccaaaacacgtgtgatcttcttttcaagttgtttttcaaactgtttttggatctgcatatatttactgttcgcacctgtcagatcatcattgtcattattcccatcagccaatacatttccattactatcaacaactttaacgttttcggctgttaatcccttaacggcacctgtggtcaactcaacgatccctttaactgctgaatttgagatcgtgttgccattcaacgtcaatgcaaccgatgctttggctttttttcctttggcatcatcactaaagacatcatcatcaggcatcgttaacattactttagcttttttgacagcatttaaagaaccgatcgaacgttccagctcaccagtcgttgcccgctgatacatgatcttacggtcttcatcagtggtcatcatgctggtatcatcaaataactcatagccttgtgaactatcgggcagtttgttatcgacggccatatcgatccgatactggtcgacttttgtcttatcagctaagatcgttttaccatcatcttttaacttgtacttgatgtcttgatcttccaaatctttcgtaaccgtcccagcgtctgcgtcacttaaattcgaaaacaaaacggcatactcaactctggtgttcagataatatacgatcccaccagcagcaagtatgctgatcaaaccagctatgatagcaatttttactaaacgatttagattagaccatttgtcttttaagtttccaaaaaagtcctttactttatccacttccaagcccccactacacgactaaaactgcatgttcttaagatcgttataagcttccaaagctttattacgaacttgaactgcagtctgtaaagttaattgactttcagtcatattgatcatgacctgccctaagtcatcttgttttccactgatcatatcggtagtcgactgatccataactttcatgcttgaatttaaaccggataaagcatgatccaaataatcaccgaatgttttaccggcgcctttaactgtctgatcagaattatcgagtccagtaactttgcgcagttgagtagcataattatttaagccgttaataccattgacctgtgccattttatctctcctaattttctgatatttctagtgccttactcaagatctgcttattgacctgactcgaagcaacatttgcttcgtaagatctttgcgattggatcaagtcgatcatctcatccgccaagttaacattcggtaaatgaacataaccattttggtcggcatcggggtcatctggtttataactcaacttctcagtttgatcctgtgcaatgccagtcactcttacaccggaactctgtcgtttgttggcttccatgatatttccattgtctgcttcgacttgacgtaaattttcagcgaattgaactgacttccggcggtacgggccaccttccggcgttcgtgttgtattgacgtttgcaatattagttgatgtcgtatcaagctttaaccgctctaaggctaagccgctggcattgatctgcaatccattaaaaatactcactctgatctcctcttctccaatttagtcttaccattaatgattcaaaacataactcatcatttggtaacgccctttgagttgtgatgtcaacgcgctataattcaaaccattttgtgcctgatttaacatctcaacatctaaatcaacgttattgccattttctttaacagccgtatcattgcgcacgctttcatgcggttcaattgccccgcctgcttgcatatgcattttagatgtagtttttaggtgtgtttcttggtccaaagcattattcaaaacactttcaaactcgattcgtttagctttgaaacccggcgtattgacattagcaatattatttgcgttcaattgtgctctattagaagaaacgtttaaagcttctttcattaagccatatgtattttccaaaattaattacacctattttctttgatttaacactaatattttcaaactttttatatttcaattttcatagtagttgcttgcagccaagatgtcccctttatcaaactttttctatatttttcacagcattataattttagctattaacatactcacaatcaagttaatttttaagttattttcaattattttattaattatttttttaactcgtcgtttgtaaaattaagttagaaataaaaaagccatttgtggtagacttttgaatatccctaatcaaaagagaggtaaccacaaatgacttataaacatcttaccacatgtgaattaacctttatatataacttttggaaataagatattaaagcctatcatgccgctaaagctcttaaacgttccagcgaaaccgtttatcgtgtttaccggtttctagatgctggtaattcaattagtcaatttcaagaaaatcatcgagttaataaaactcattgcggtcgaaaagcaattgaattaccagaagatgaaaccaaatacattaagcagaaactcgcattaggttggacccctgatacgattattgttcgagctgagatacagatcagttgtagtatgagaaccttataccgactttttcaaagaggtgttttcaatgtgaaattgttgccaatgaaaggtaaaaggcatccaaatggttacgttgaacggcgtggtaaagctggccgactcggcagaagtatttatcaacgctatcaggattatcctcattttcaacatgaatttggtcatttagaagcagacaccgtccaaagcaaagcacatcaaggtgcagttatgaccttagttgagcgtctctccaaagttgaaatcattttaaacatccaacaaaaatcggctgaatgcgttaataaacatcttaatcaatggttgtcccaacagccaaaacaccttttcaagtcaattacttttgataatggtaaagaattcactggttggaaagaaatcgcaaataagcatgatattagtacttattttgccgaagttggggctcctaaccagcgtggcttaaacgaaaataataatggactaattagacgagatggtctcaacaagagcatggattttcgcaatttaccaaatgctttagttcaacaagtcagtagccggcgtaatcgtattccaagaaaatcattaaattataaaacaccaattgaggtattcatggaaaacatcacagataaacagctatgttatttctaacttaatttgacatttcaagagactaaaaaaggcgaactatcgcatttatgtatgccatttctgaaccacaaaaattttgaaagcgccttgattgctaatttatatataaatttaaagaatgtctaataaatttgcttgttaatatacaaatttaaaaattagtcatttttttggcattttttacttatattatatttcaaaaattattcttgttgaaataatttttgcgaagaaaatgagattttcttactgaataaccgaattacccacccaattttcatttttcgctattccatattgaaaatgtacttcaactattttcaataataatttgctcagtttatttttttatcactagttccactctcctatttttagcacgccccgctgatgtatcgttagttgctttggggttattttcaccaaaagcttcaattgagacgttgccttccgtcactgccttttgctgcacgaagaaccgcatgactgaaactgctcgagcagcactcaattcccagttacttggatagtctttcgattcttgtggcacattatctgtataaccagcaataatgacctcattttcttttagttgttgaatttttggccccagttcctttaaagctgcagcagaatcggcagtcagatccgcactaccgctgtcaaataaaatattgctatccaaatttaaatgtagtccgtcagacttgagtgaagcttttgtgttttttcccaagttcatctctgcagcagtttcgtttaaactatgagcaatttcttttaattgctgttcttgattctgttgtgaaatactgccctttactccattttcttgtttgatcgctgcttttttagttttagggtccggtgcctgactatctttttctttattagttactgatggtgaatcaagttcgattgcgtttgatccaccgactgccgcacttttatgattttgttgctctggtgacaaagccatgatcgacccaaactctgaactgattttttggaacttactatcatcgaccttggctgaagcaaacatcacaataaacagggcaagtagcaatgttaacatgtcagaataagggagcatccaggcttcactatcactatcattttttttctttttcttacgcatgcctgtcccactttctttccaatctactcatttttttcaatgtcagttcgtctggtttcactgatcatactttcaaggttcttttccattgttttcgctgaaactccttcttcgatcgccaatgtccctgccatgatcagttctaaattttgaatttcttgttctgatttacgttgcagtcttttagcaaaaggcatgaacactaagtatcccataaaaataccaaataacgtcgcaacaaaggccgatgagatcgactctcccaagacaccaacgttatctaagtgtccaagtgcaccgatcaagccgatcacggcacccatcacaccaagtgtgggtgaagtactgccggcagtttgcatcatggcagttcctttagcatgccgttcctcgatcgatgagatctcattttccatgatttcttcgatttcttctttatcgatcccgtcgaccaccatctccatgccgcgttttaaaaacgcatctttttctggatctaagttgttaacaggcgtttccaaggccaacaagccttcacgcctggcaacatttgataattctactaatttatcgatcgttgcgcggtaatcatacttttttgcttgaaataatactttgaaaattcctggtaaacgtttgatgtcagccagcggatatgtattgatcagcgctacaatgatccccccaaaaataatcatcatggcctcggggctaaataacatggctaagctagcaccttttaaaatcatcgctgccaccacgatgaccaacgcggcacagataccgatcagtaaaaacaggtccattttttctcctcctcttcactcttccattttatttatcggacaaaattgaaaagatttaaggaaactcattaaaaaaatttccaaaaaaataaaacgactacagaattaacaagcctgtagtcgtttcaactaaatattttgtttttggctaacttcattccaagtttccaataattcttctaacaatttaacaatgggcggcagcttttccttgtctttgctgacattagcggccactaattgttgcgtgataaagttatataaacgatttaagtctgtcgtaatttgactatcaaccgaatgatctaatgaaaatttcagctcatcaacaatgtcttgagctctaagcaattcatgatttgcctttaccatatcattttgattcaatgcaatttcagctaacttgattgctttgatgcccccagagatcaataaactgatcagcttgttaggcgaagcggtcaacacttgattcttcaaataaaaattacgttgcttttgtgcctgttttacatccatttattcaattcccccgccatcaatttaactattttgtaattccagcttgaagtcacggatcaatattctaattcgatcatcgtcccatcggtaattttttggtggtaagtcccacccctggaagacttttgacgatctaaactctttaattgctgcaacacttttttcttctctttcgccgttacttgcatcagactctgatattcagacattacttgttgtaaaaccactttttgctgcgctgacaagtttgactcagtttcctgcaattgagtcaataattgatcattggcttgtagtaaagctagaatggaagcagttgtttggtcccagtctttcatattttgctttaacttcgttaatatttgttcaacttctcgtttttccaaacttctgctcctcttttatgatcgttattattgttgatctacacccaactggctttgcatgtattgcatttgtgaatcagcttgcatcatgatcgagtctaactgggtaaactgtgcaatatattgttcccgtttatcggccaaacgcgcggtgaagtcatcgatctgcgagttcaagtctttgaccatcttatcaatgctatcgcttttattagtaatgattccctttttagtagcatcgttgctaataaattcattgaccaaactatttaatttagcagtatagcccgtgtccgtactttcgtcgaagctgtcctcaccttgaacatagaaaaagtcatggactttttccggtgaatcagcaagttgtgacttaaacttgtcttcatcaaggctcaaaacaccatccttgtcaacagaaaagcccatatcgaagggactcagactagcgccattgtctttatcggcttgtgtgatcatatttctcaaagatgactgtagccgttgcagagtcgaatcgccaaccagcttaccttgaacattagtcgaagaactttccgctgtggaagctgacggattgcccacatccaggtcacttttgatcaaactcattaagttattgtattgtgttacaaaatcagtagcggccttgactgtttttgaatcatcattcttcaaggataaagtgacggcatcttcaggcttgatctcttttttcaaggtgatcgtcgcaccatcgatcgcatcagagatcacgttactatcactttccatgtcaatgccgtctaggctatacttggcagcctgacccagatcagctgaagtatttaaccctaaggcagctaaagtagctgtattctttgtttgatccagtgttgtttctttggcacctgatttgttattcgtcaaaactaggcgcttgttgatcactactgccgaaacaccaatattttttgattctttattgatcttatcagcaatatcgagtagtgagtccttctctgtgatatcaatatcaacagtttctgggctatcgtcagttttttctccttgataagcaaaagtcagtttaccgttcaagttaagatcagtgctattcgtctctgctgcgctgacctggctaccagtcaacttagtttgcttagctaattgactgaccaacaactcaaaatcgccaccatttttggcgtcagaatttcctgagatcgttgctaggtcttcattcgaacttttagcaattttagaataataactgtcattattctgcaaggctttaagcttagtttgaaaattacttaaagctgatgaaatttcactccaggcagacttttcctggttatattttgtaaccttattttgtaacagcgttttaccgccagattcagcctcaatcaactgatcaacaacatccgttgtgatcccagagtactggcccaaaaagctgagccctgcattgggtgctgaggtagcacttgtaatatcagccatttacgtcactatcctttcttatcgaccgcaattcccatctgatcccagatttttcccaaaacatcaagcattttatgagaagggatctcctttaacactttgccgctttgcatatccaccatttcaacgtactgccgtccagtccgctgatgaatttcgaatttcattttaaaatcgcgacccagtaactttttattcaatgtatcaactgctttttgcagttcttgcgggtctacgactacattatcggctgaatcctcaacttctttaacgtttttaccatcatttaactgaaaaagtttacccaaatatttttcctgatctttacgaatgaatgattcatccattaatgaagtatccatttcataactatcagtcgcaactttctggattttattaatagccggcgtggggtcgactggtggaatattattgatctgcatgttacctgtcccttctttccgtgtcttacatatattcactccaatatttctagttaaattctcttttgatttagtcaggctgcgcgagtcaacttctttcggcttatctaagcaacagacttcgatgataagaacgtttcgaaatcagctgttccgacaatgcttggaagtccccgatatgccttcaccttgtttttagtcaggttacgaaatgcaaaagcttgcgcttaactaacttcaacaacaagtcgctaaagacatgacttattgttaaagtcccttaatgctcggcttcataccgcattttctccaccttgtttttcttagtcaggttacgtgagacagaaagctctgcctatccaaccttagcttcacatcgcaaaatacgtgatttgaagctaaggtccgatagtgctcactttctcccgtctcactccaccttgttattaaaaaaaccgaccgccgaataaacgacgatcggcctgtgccaataatattttgttagccctgaagtaatgacaagacactgtttggcattgcgttagcctgtgccaacattgatgttgcggcttgtgaaagaatattggacttcgtaaagttcatcatttcttctgccatatcaacgtcttcgatccgtgagttagcttcagaaagattttctgttgttgttcccaggttgttaattgtatggttcaatccattttgtgcggcacccagatcagcacgttgtcctgaaactgtttcgatagcagctttgatatgcgcaattgagtctctagcattggtagcattactcaagtcaacacctttacctggaacagctggaattatatgtccaggatctgtatcattttcaggtgttccaggagtcaaatcatcaccaacgcccaaagcatcagcatccattttcccaattttgacttcagcagtttggtctttacttgcaccaacttggaaagtaaatttttgattatcattattcaacaacttctgggtgttaaattccgtgttgttagaaatatcagtaatgttctttttcaaagcggtaacttctttagtgatcttaccacgatcttcgttagtcaaagtatcgttagatgcttgcactgccaaatcattcatccggctcaaaatgctatgagtttcactcaaagctccttcagctgtttggatcaaagaaataccatcttgagcattacgtttagcctgcttcaaaccaccgatctgtgctttcattttttctgaaatagccaaacctgcagcatcgtcgccagctttgttgatccgcttgccggatgaaagttttgccaaagaatcactctttgatgcattggctgcagataaacgtgaatatgtgttcaatgcagctacgttagtattaattctcattgtttgttcccccgaatattttgtattttgttgcttacacttattactatcggaatttattttaaatgtttaagtatgaaattaaacataattttgtttttttgtttaaaaaactgtccactccatacaagaagggacagctaaggtcaacctgtttatctagacagacttacattacaattcaaattattagccttgaagtaatgacaagacactgtttggcattgcattagcctgtgccaacattgatgttgcggcttgtgaaagaatattggacttcgtaaagttcatcatttcttctgccatatcaacgtcttcgatccgtgagttagcttcagaaagattttctgttgttgtacccaggttgttaattgtatggttcaatccattttgtgcggcacccagatcagcacgttgtcctgaaactgtttcgatagcagctttgatatgcgcaattgagtctctagcattggcagcagtactcaagtcaacgcccttgcctggatcttctttcgtaccagccccagcatcccaaacatcaccaacttctaatgtctcagcatccattttcccaattttgacttcagcagtttggtctttacttgcaccaacttggaaagtaaatgtttgattatccttattcaacaacttctgggtgttaaattccgtgttgttagaaatatcagtaatgttctttttcaaagcggtaacttctttagtgatcttaccacgatcttcgtcagtcaaagtatcgttagatgcttgcactgccaaatcattcatccggctcaaaatgctatgagtttcactcaaagctccttcagctgtttggatcaaagaaataccatcttgagcattacgtttagcctgcttcaaaccaccgatctgtgctttcattttttctgaaatagccaaacctgcagcatcgtcgccagctttgttgatccgcttgccggatgaaagttttgccaaagaatcactctttgatgcattggctgcagataaacgtgaatatgtgttcaatgcagctacgttagtattaattctcattgtttgttcccccgaatattttgtattttgttgcttacaaatatatatatcggttcagttttaaattgtttaagtcattttagaaacttttttagaaaaacgagttttaatctcagatacccattttcagcgaaaaaaagagccacatcttttatgatgtgactccgttcttgctatgaaatcaattggttctataatatttggtactgatagataaaaacttctatcagtaccaattttgttttatgataaaaaaatagagatgaagtccgcacttcatctccgaaaaacaatccctacactgaaaggaatgtcctacatggcgaattgtacactagatcttctcggaattaaagactcacgtttgcggtttgatcccaaatataaaaatgaggcaacaacttatgatttttacaaacaccaaaaagtgcgttttattcatctgctgcaatcttattcttgttcttgccccgtttgttgcaaaaaaatgaaacgtaacggctttaaaaccgttaaaatgattggcttaccttcaggtggtctgaccaatattttctcgatccgtaaacaaaaatatctatgcccgagttcaggtacatgtcctcaaactatcacaaaattagcggagatcaaggatgtcagagccaacaatcaaatctcacaagccgttaaataccaagcagtttctaaattaggtcagaatatctcacaaaaagacattgccgctgacttcggcatttctggcatgaccgtgatgcgctttgcgcaagaagtctctacttacttagaaccaaattatcattatttgccgcaaaatatcgcttttgatgattttaaatcaggcaatttttctgcaagcggcatgagtatcattgttatggatattgcgactcaccgcactttagacattgtcaggtcacggcagaatacatatttgcgcagctattttctgcaatatgaccgtcaagctcgttgggctgttcagactgttacagttgatctttatgcgccataccgttcttttattcatgaaacttttcccaatgcgatcattattgccgaccgtttccacgtcataactcaggcctatcgtgccttgaatcaagttcggatccaagctatgaaacaaggcggacacggttcacacgtttcccgtgctctgaaacattattggaagctcttgaccaaagacgccgcgcgtctcgattttaaacactatcacaaaagcagaaattttcgaaacagccagttgtgtgaacaagatatcgtggcacgtttattagacatgtctgccgacttgcgtttagcttacaattactatcaaacacttttacaagccatgcatcaagcgaatccagaactgttagaggaactgacccaatcagctgcgggaatgcctgcacccattaagcagaccaaccggactttacgtaagcatctgcaggagatcaaaaacagttttgaaagtgccttttccaatggaccagtcgaagggaccaataacaaaataaaaaccattaagaaaactgcctatggcttcagaaactttgcgaatttccgtctgcgtgttctagtggaattaaagaatagttacgtgagtttgaactttaataatcagataaaaaaagccgcccgttccattcaggaacaagcagcttaaacaagctagaccaattacttttcaattttaataatttatttcatcagtaccacttgataaagaaccaatcaatttaataccagtgattcttgacccaatgtttctgtgcgttagtccagctgccgtatctttgttggacatattgagccgcaactttttcttgattggcaggtgaaaaatcaccatgcaaataattttgatccagctgatatttgccaatatagcgtccatttcgagcattatagttattgctcgactcatgctgaataatataatcacgtgcacttttttctgccccagccaatgttggctctaaactgttgctagaactggcagaagcgttctcatcaaggtcaacattcgctagtgacgctactgttccagcatcattgaccatagaggtcggttgcgcagccgcacttatttgtgctcttccaggaatagttaagttctgtccggctagaataaaatccggatcgtttaactggttagcctgagcaacagcttgtgtagtggtgtgatatttctctgccaactcagagacagtatcgccctttttgattttgatcgtttgttgtgctgtttctaaagcattcgaaaactcagctgcttgctgcgaattagtcgcctgtgttgcggcttgcatcgacccattattatgaacttgcaggtcattattaactaaattcatttttaaaacccgtttccttctttaattactatcacgattcctaattatatagtgttttaaaatattttacagtatctttttaatatcgatcgaattaatttgcttttcccagcaattatattgaataaggaggtattattttgtccccaaatcaagccttttttctcactgttattggttgcctgttagctatcagttcatcttattttatcgtgcgtctcaatatgctaaagccaacactcaagcaaaatttcttggaccaatatcctgacacggatgaccaagcttacaaagcgcaacaatcaatgaaacaagcttatttcaacgcatccttttacaagcaagctgttcctttaacatcttggttagtccttttattctttttatcaatcggtggctgtctaacagcgctctatctagatgccctgaacattgcaatccgtcttttggggagtgcattcatttttatcgcgtttctctaccttaagttgccgacttttcaagcacagcatactttttggaaatcttatctacaagcgcatcctgaaaatgaattaaaagtcgtcatactcccactcgattcacccattcaacagcggcggattgccttactcaccaaatttaaatgttgtactcttgtagcaggtctcatattgttttacgcctctctttttctataactcaaaaagcggcaccaaccattttatggttggtgccgcttttttaattaacgaatttcaattgggttcgttggttggtctgattcacttaacttcggtagcatcaattgtaagacgccatcttgatattgcgcatcgatttgatcccggttgacaccaggtaggtagaattgccggctaaagcgcccataatgccgttcgctttgaacgatattgccttgactgtcactatgatcagcgaaactatcacgtttagcactaatcttcaatgtattatcttgataatccacgtgaatatctttcttgtccagtcctggtaaatcaaccgctaattggtaatccttatcggtctctttaacatctgttttgagtaagttgtccgtttcaggcgatattgccaataattgctgaccgaaattcttgaaccaatcatctccaccaaaattatctagccaattttgacgaccattcattaattcgtttgccatctctaaaacttcctttcttaatctttacaactctattctagtccgttaattatgaaatgcaagtaattagcactcgacgttgttgagtgccaatttttaaactagaccactgatttttcagctttttgatacccgcctaatatggttttgtgctatacttaaggttccaaaaatattcggaggtaggttcatatgaaaattgttgtcttagcgggcgggcgtagtaccgaacgtaacgtttcattaacgtctggacacaaaattaccaatgcattacaaacgaaaggccatgacgttgctttcgttgatcttttcttaggaaatgatttgcacgacgtcgcatcaatcgatgatctttattcttcaacacctgttgaaaaagattacgacatcagcgacgaagttttaacagacgacgccatcaacgcattacgtactgatggttcaacacaactctttggcccgaatgtcttagagatttgtaaaactgctgatattgtcttcctcgcacttcatggtggcgatggcgaagacggtaaagtccaagcggttctcgatctctttggaattccttataccggtagtgacacactcgcagcaggtattacaatgagtaaaaaggtttcaaaggaaatcttattatataaccaaattccaactgctcggtttgtcgctgcttatcgcgaccaacccatgccagaaatcccatttgagtaccctgtcgtggtaaaaccaagtaacggtggctcaagtgttgggacgcatatcgtgcacaacgaagctgagttacaaccagctgtcgaagatgcacttcgtttcgaccgcgaggctttaatcgaagaattcattaaaggtcgcgaattctcacttggcgtgattaatggtcaaccattacctgccattgaaatcgtcgttaatgacggttggtatgactttgagcacaaattcgtgactggaaataccactcaatttgtcacaccaccaaacgatttacctgatgatgtgcacgaagccatgaaacaaatggcacttgatgctatgcaagcacttggcttaacgaactacgcccgcatcgacttcttctggagtcctgaaaatggcttacacgtgatcgaaggaaatacattacctgggatgacgccactttcattaattccacaagaagcagaagtgcttggtatcagttatcctgatctttgcgaaatgattgttcaaggtaaattagaactccttaaagcaaaatagccaataaaaataaccctgtcgacgattttcagtcgacagggttatttttatttggttcatttaaaactgattacttagttcctgattaggaactattcttaaaaaaacacgtcgattggaattcccaagcggtcatgtagtaattgaatttctttgacggtaaatggaatcttccctctaatcttacgattagccgtcgttaatgttttgcccaatacatcagcaacaacttgctgtttcaaatcatgaccctttaaataacctgatagaacaaataatttttctgccacattcagcacccccaagaaacgttatcaatcccgttccacattaggaatattacgataatgtaagaactctgtcaattaaaaactttagtcccaagtgttcacttattgacgtcatttgtcatataattaaacttataagtcaaacgcgtgataaaggacggtgctaaatgttcggacaattattacacgataagcgaactgctaagaatctaacaatgcaacagctcgccgatctactcagcgcaaaatataataccaagattagtagctcaatgatcttccggtgggaaaaaggcgctgccccatcactaaaagcattatttattgttgctgtcgaattgcaaatcgaccttaaccaattggccacccttgttgcggattctaaccgcgtcaattagccgcttttttttgtttttttcccgatttttgaatggtcttcacacctagtacatctaaaaagaacgtaaagattggtaatccaacaattaacccccaagttcctaagaaacgttctgctacaaataaaacaacaaatgtaaagaaaattggcagctgtgttttactcgacataaatcgcggattcaaaacatatgcttctagggcatgaatgactaaaatcatcaccaatatataaaccacatactgaattccgccgactgaaaaggcgataatgcacaatgggatacatgaaacgatgactcctgcgaccggtaccatcgacaataggaaaatcatgatggctaaactcggaatattaggcattttcattaccgttaacgtaatcgttgttaacactgtattcacaattgcaatgaagatttgggcttcaattaccacgccaaaggtattcacgaattttttagcaaaatacatgatatcttggaagaaccagccgtaagtactcttcaaaaagagttttccaaactgcggtaatcggtctagctcaattgtgtaaaagaaactcaaaataaacgataagacaattgtgacgcccattgttccgattccggtgatgtaattaacgattgttgatacaccgtgtttcaactgatccgtcaagttgaactgtttcatgtaatccccaatggttcgcataaattgattcgcatcaaatgatggactttggtagaaattatagacactctcgcctaatttaattgactgtttagcaatctgtggcacataaatcgttactgctagatacactaaaaaaatcaccaacatataaagcggcacaaccacagctgcgggcggaatttttgaatactgttggacctttcgtactaattgagtcactaaaaaagtaaagatgaacgtcagcaaaatgatattcatcatcgagcgtgacacatagatgaccccaatcaacgttaagagcactacaactcgtcttaactgctgattcgtcacaaatttttgatataaactcacgcaatttcctcctatggcaattctatatcattattttacaacacttcgaactaattggatattctggaattccgatagttgcaacttacatctttttaaaaatagtcgtatactactctggtacttcaaatttacacctagaaaggattttcggtatgttagaaaaaactttttataagaaactactacaacactcttttgatttccctgttaccgtcaactattgggacggcagctccgaaacctatggttctggagagcctgaagtagcgattacttttaaaaaagcgattcccatcaaacaattgtccagcaacgcatcattagccctcggcgaagcgtacatggctggcgaccttgaagtgacaagtaatacaacagataccccacttcaaaaactattaacggcggcttacactagcgcagacagtttcatgcgtaatagtcgctacattcatctgattccaaaacaatcgcattcagaaaaggcaagtaaaaaagatatccaaagtcattacgatttagggaatgacttctaccaactttggttggataaaacaatgacttactcatgtgcttattttgaaaaaccaactgatgatttagagacagcacaaattaataaagtgcaccatattttacgcaagctcaatccacaacctaaccgaacattgctcgacatcggctgtggttggggcaccctcatgttaaccgccgctaaagaatatcatctcaaagtggtcgggattaccttgagtcaggaacaatatgatttcgttcaacaacggattaatgacgagggccttagcgatgttgctagcgtccaacttgttgactatcgcgaactcaaacacgccccattcgattacattaccagtgttgggatgtttgaacacgttggtgaagaaaatcttggtgcctacttccaagatatcgctgactacctcactgatgatggggttgccctccttcatgggattacccgtcaacaaggcggtgcgcgcaatgcctggattaataagtatattttcccaggtggctatgtacccggtttagttgaaaatacacaacacattatcaatgccggactacaaattgccgacatggaacccctccggcgccattatcaaaaaacgctggaaatctggactgctaattttaacgcccaaaaagacgtcattttaccaaaagcaggtccagaattcgtccgcatgtgggatctctatctccaagcatgtgcctcatcgtttgaatctgggaacattgatgtcattcaatacctcgtatcaaaaggccccagcgcaagagacctcccaatgacaagagaatatatgtatgattagagtgctgactgtcgcgcttagtcattgagcattaattcaaaaataacataaatccaggttttaggatttatgttatttttagattaagcggaaattactgcgacaggaagcacgtttagagtgctgagtcgaacgggttggctttgaggattacccaaaaaagacccgctaatcaacaatgattagcgggtctttttttattgccttattttaaaagcgcttctgccttttctctaacttccgcgtcgctcatcttaagatagggtttcattgcctcaacggttttatccgtgttccggccgttggcttccatatagtgatcccacaaagcatcacggacgattgtgttatcgtcactccaatcaaatgcttctgacatcttcatatctaaaaccaatgttttttcaacagctgctgccatattaaaaacctcccatttcttttttacaactctaatgataaacctcttttgaaaaagtgtaccaaaatacgcacttttattttttagagtcctgttagtaggtttaaaatcacgatttggctaatgccaattgccaagacaacatgggttaagatttcaaataataaaatagcatagacgcgatcaaaagctgcccatcgagtttgaaataaactaatcccaaccgcaatgttcaaactgacgtacatcactgcaaccatgattaagacgaaccagatggcggtcatcccgaaacatagagcagccaacagcgcagctaatgctaaaataacggttatcccactgtacgcactaatctccgttagatacgcgcgcaaggtggttgtcgtcttcttcaataagtaacgcttgagtaaaaatccgattcccaaaacaaccaccagaataaatagttgtccaccgagtgccttcatatcaagcggtaataagtttagccgttggcgcaagacaatttgtgacgccatcaccccagcaaccgcaccaatttgttctgaccaactggcaatgagcaaacttgccgttgcagtattcattaatataaccagaccaaacgtgactaagccaaaccacaggttggcccactgccattgcacctttagcggttgttttaaactccgcgctaaaaattgatagtattgttgcaggagcgatgtttgctgttttgtttgcgttgattggtgcactagaccgcaattgggacattggtgcaatttacgcccatatttaatatggcattgtgtacattctatcattcgtctgatctccaaatacttaatttaccgtacaactgtgactgaacatggcgcgtatttcgctaaatagctcgcatgtgtcccgattaaatgtttagatggtttcgtctttgaaccacagatgaccaagtctggttggaaactaggaatcacttcttcaacaatcacgtgtcctggattaccttcatttaaaatcggcgtcacatcttcaaccccgaattctttcgctttttgaacataaacatctagatcggctgcgatttcttctcggcgcccttcaaccacgtttggtgagagtgattgataaatgttcaaatcgccggtttccaaaatgctgacaatccctaatggaatttgataggccttagcaagcgtacaagcatagttaaaggcccgtttggatgaggttgtgtcatcatcatcgatagcaattaataatttttgatagtgcattgattcaacttcgatatttaattggcgtttttctgtcattagttaagactcctcgtttatttaatcaataatgcttctttggcatgaattaatcccgtgattaattggttgactggggtcgcaatgtgcttttcggcgcctttgcgtgccacgtaaccatttaagtaatccacttcggttaagcggtgatgttgcactaaatcctggtgcattgaaggataatgaccacctgcttgttctggtgcaaacatcttgctgatgtgggcaatcgtcgtgggaatgtctaattcaacggcttctgttgcagcaaccgctgagaattccgccacaattgaacgcaagagttgttgcgcttgtggggtttggcccaattgtgcaatattacagtctaacaaggcacacaagctgttcagtgtcccattaacgcaggctttacgccagattgaaaagagtacatctgaactatattgcgcatttaagccagccgcactcaacaaggcaactaatgcttgtgccgattctttgccatctggatcaacattttgtaattcgacattcccagagcctgttaatgtaatcgcacctggtcccgttaaccccgccgtccaaagtgtaatgccgacaaaaatattttctttgggcaggtattgttcaatcgtttcgggatgcccgagaccgttcaataaacagactacttttgtcttagcaccgattaagggtttgatggcttgtaacatgtcgactagctgcatcgattttgtgaataaaataatgacgtcttgaacttctttaatatccgttggcaaagcagccggaattcgaacctgaacgggttcgtgccccgcttctacaaccgtcaggccattggtattgattgcttgaacgtgttctgcccaattatcaagtaacacaacatcatttccagctgattgtaacatgtaaccaaaacgactgcccattgcgcctgagccagcgattgcaatttttgtcatagattataaaagctccttttatgatttgaattctttttaatcatgccacatttttaagattttttcacccgtaaccgcttaattcaacttaaaaagaagctgtcaaaccgcttatagcagcctgtcagcttcttaaaataggaatttacgccttcttaaaattaattgatcaatcaataataagaccaagctataaccaagactcattgcccatgataataaaatatcaactagcgaaatgtgtcccaacgtgttgaagagttgcgccatggtcgaaacgggtggcaaaatccccagaatatagaggtagggatgccagtaattgacaatcgcttcacctaaactgccgagaaccaccatcaagatggtcaacgtaccggccatccggcgattcactaaaattcgccgttgccagaacaaaccggtcattactgaaacaggtaaaatactcgtcaacattaaggtcccgcctagccaatcccaccagctaagtcctcgaccaaaagcgtggtgcccattgagcacgtaagtaattgccaagcttcccatcccaattaggacaaagaataatcccaacaagatgagatagctaattaaactgagataaaaacggcattgcttctttaattttaaaattaaaagtttttccatttgaaggggaaattgattgatgtaactgtaggtcaaccacgtcaataagataaacagtgtcattaataatgtagcgaggctgccgacgaaatcttgtggttgcaccgcataattgactaataaggccactatccaaaatagcaaaggcccccacaaattcccattatcaaaaaccattttctgatgcaaacgtaactgtgcactaaaggacttcataacgtaacccccttaggctaaagccactttttaacattgcttgaattaattcatcactatttttgatatttgcatacaagacgacgtaccgcgtaccatcaacaatttttaaagctaactgttgtaaagtagcgggaagtgcgagtgatcgcggtgtagttgcaaattctaaccgcatcaccttttcttccggctgcggtaattcttcaatcggcaatagccgcatcgcatctagttcataaatttcagtagccaactgttcgattaaaaaagcgttgttagtgccgacaatgatggcgccccctttttggcggtagtctttcaaccaatgaatcatccgcatctgggtcgttccatcttgaccagccaacggttcatctagcaataaaatatctggggtccgcaaaatcgcctgcacaaagttcactttttgcagactaccgcgtgacaattgatttaacggtgtattaagtgccgccgctaacccaaattcataggctaattcattaatctgaccttctaaatttcgattgctaaactgatctaattctcctagcatccgcaaataagtcttaggtgtcagtccatttggtgcgagttgttcagccatatagccaatccgcatcttcggtgcaatctccagtgtcccgcgttcaatattcgtcaatcctgctagtacgttaagcaacgtggttttccccgcgccgttttgcccagtaatcgcgatacaagcttgccgatcaatccgtaaattgagacgtttaaaaagttgtcgccgctgatatttttgcgaaaaatcacgcaattctagcactgctcccatttaacttgccaacctttactggattattttgcttgccaattagcgatgttttgcgcagccaaagctaaactcaacacagcatctttagacaaatcagcttggattaagttatgtttaacggttgcagccactgcaccaatgacagccaaaccatatgtcaacacttctaaatcgcgtttaacgagatattgatcttcataaacagcttcgtggctgtattcaaagttgactttgttttcagctaaaacaccatccacgtgggtcaccataatccgatcggtcacatcgattaataatttgtggtcatctgataacgttaatttatgatctgactctgattgataatatgtttcttctgtaatatcaaaatacttaacgaccgggttatttaaaacgccaaaatcatccaaaacagcaaaaattgtttctggatttaattgcactttgcgatcggcaattgctgccatgttttcttctaaccaatctgctaattggcgaacattatcctgtgtcatatgtgggactcctttaattaatctaaatgaattctatccctccataatacaccatccgcaatattagcgcgactgactgcaccaaaaagttactgtgacatcagatgatcatcaattacgccagctccttgtaagaatgaatagatgacgactggtccgacaaattgaaagccccgccgttttaaatccttgctgatttggatcgatagctctgattttgcggggacatccgcccaagttcggggccgatttacaattggctgtccatcaacaaagccccatagatactgatcaaagcttcctgcactcttttgtaacgcaaggacggcttgtgcattattgaccgttgcattcaacttagcacgattgcggataattgccggattggtcagtaactgctcaatttcggttggtgtcatctgtgctactttggcaatttcatagtctttaaatgctgtccgaaaggcagcacgcttatttaatacagtccgccaactcaagccagcctgatacaactccatacataatagttcaaataagcgttggtcatcatgttccggttttccccactctgtttggtaatacgccaataattcaggtgaatcatacatccaatcagcttttgtcattattaccacctcctaaattgaactacgcaaaaaggctaaaaagaattcatcctttttagcctttgggattgttatttattttttcttacttgctttttgataagggcgattttcaacatcagtcttgacgattaacacgtcacagatagctgtgcggttaacatattctgtcacagaacccatcaacatccgttcaactgcattcaagccagtagagcccatcatgattaaatcggtttgatattctgtcgggaagtcgcgtgcgataacattcttaggattaccaaaccgcacatgaatctcgacatcttttaaaccgtcattggtttggatatcatattttaaactgttgagataattctgtgcatcttcagagatttggaaaatagcgtctcctgaaagcatgccactataactccctgcaaattgcttggtatccaaaacgttcaaaatatccaagcgcgcctgattcatcttagcaacccacactgctttatttagtgctaattcagcttcttcagagccgtcaactgggacgagtattcttttatattcttgaaccatgttgttcatctcactttctctatatgcacctgttacactttaagaatataccgcttggaaaaacaattcaagcaaaaaagcgaagcgcttccgcgaacatttaattagaagtagtctttcttttttaaccaccaaccgacacaaaggctaatggctaatgacaatcctaatagcacgagaaaccctaacttactctcggctagcgggaccggtacgttcatcccccagaaaccacctaacgttgtcggaaccgttagaataattgagagtgatgttagtgtcttcataatattattcaatcggtttgaaataatatctgaaagcaaatcacttaactgtgccaataactcacgatacgttgtaatcgccttatcggacttggcaaactgcaagtcaatccgatacagtaagtctgtatgtcctgacacgcgctcaaataatggacttgccttaatttgcggaataatttgctggttactcttaagccctaaatccaaatagacaacactctttttaagagacttgagtgcatacaacaaccgattgcgtgtcgaaacatgtacattttcttccaattgttcaatctgttgcgcaacgaccgctaaagccgctaaataacgttgatagatggccgaaacactctttagagcaaccgtttcaatttgaccatccaggccttctaacgtgagtatttcatcgatgagctcggactgttgatgccccacagttaataacgtctggccactaatgattaacgaaaaaggccgcgtaatatattccgcatgatcttctgaatcatgggttttaactggtaccagtaaacaaatatgggtcaatacttcaccggtgtccgttgtaaatgtttcataccgtgcgacttcattgatatcttgggccacctcaaataacaccgctggtaagtggtattttttagcgaaatggtgcatctcatgtttagttggtgcttcaaaatgaatccagtcggcacttttttcagaggttccttcaaccaactggccctcaggtgtcatttcaaaatacgtaatcatctgctcactccactcttaatacccctatcatactgtttctccccacatactgacaagttaagttgattgcccattaaatatgctacaatattggtatcattggataaggagttgacgcatatgacacaccgcattttgccacttgaaaaaggccataactttagagaattgggcggctatcaaacaaaagacggccggacccttaaatggcataaagtcttacgttccgctagtctagcccacctaacaccacatgatttagcttatttaactgattatggcgtgcgctatgatgttgattttcgctcacctgaagaaactgccaagtcaccagacaaggtccctgccaatgcaatctatgaatccttacccgttttcaaaattgatgaaacggctagtacggcatcagaagctgatctttttaaaacgttcagtgctgatccaaaaagtggtcatgaacatatgattcaagtctatgtcgacttaattaaccaagatcactccaagcaagcttaccggcaatttttcgacttgttgctagcaaacgataaggaggaccaatccttactgtttcactgcacggctggtaaagatcgtactgggatgggcgctgttttcttgttgagtgcactcggtgttccagaagaaacgattcgcacagattacttattaacgaatcaagcttctgccgctttcgtgacccaatcgcttgcaaaactacaacaaaaaacacagaaccagtctgtgttcaaaagttatcagtcattactaacggttcatcaagattacctcgataccgccaaacaagcgattgaatccgaaaatggttcgttgcaagactatttatcacacgatctccagttaagccaacacgacttagctgacctgcgcaaaatttatttagcataacccatttgtttcacatgaaacttaaaaaaggagcgtggctttgaatgcccactttaaaagaacaagtgattgaggcgagcaaaaccatcggcatcgataagattggtttcacatcggcagcgccttttgattatttagaagcaagtcttaaggaacaaaaagcaaatggtcattcgactggattcgaacataaagtgcttgaagaacgcctttatccagatttaattttcgaccaacctaaatcgattatcgcgattgctcttgcctatccaacaaaaatcatcaataagccagcgcgaactggtgctaaacgcggtagttttgcccgcgcttcgtgggggattgactaccacgatattctgcgcgataagatggaccagctgatcagcgctatcgaaacacttgctgattcagatactgaaattacttttaagccaatggttgatacaggcgaactgagcgatgtggctgttgcgcaacgtgctgggttgggcttcatcggtttgaatggtttattaattacacccgaattcggttcttatgtctatcttggtgaaatcattaccaacatcccatttgaaccagacacaccgatggccaatcaatgtggcagctgtacgcgctgcatcgattactgtccaccacaggcattaatgggcgatggccgcctcaatgccaagcgttgcttatcctatcaaacacaaaccaaagggttcatgcccgaagaattcagaccaaaaattcgcagtgtcatttacggctgtgatatttgccaacaagtatgtccgtttaataaaggaaaagacttccacttccatcctgatatggagccagatccagaatctgtgatgcccgaattacagcccgtgctaaccatcagtaacaagcagttcaaacttcaatttggacaccttgctggttcgtggcgtggcaaaaagccacttcaacgcaatgcgattatcgcactcgccaacgtgaaagaccgcaccgcgattccgaagttactcgaactcatcgatactgatccgcgccctgtcattcgcggcactgctgcttgggcgctcagtcaattagtgcgcgatgtcacgcctgaaattttagactttctagaaacagccgcaaagcgtgaagaagaaccggaagcccaagttgaattcgacaatgcacttcaaattctaaaagaacgttattcagagaggtaggtccaccctagtatgtcagaaagtgctccgcaaaaaacagtccttacgcagccattaatccttttgatggcttttattaccggcgttgccgtctccaatctatattacatccaaccgattcaagcactcgtagcgaccactttccacgttacaagtggtgcggtcgggactgttgcaatgttgacacaggtcggttatgcacttggcttgttgctgattgtcccgtttggtgatgtgatgagccgttaccagctcatattacggatgcttggcttatccttactatccttattagccgcttacctagcacccaatttcattttctttgccttgactggtttgatgattggcctcacctcagtggttcctcaaatcatcattccatatgcagccgtcctcgctcaaccacaaaaacggggcgcagtgctcggcaccattctcagtggtcttctaatgggtgtgctcctatcccgaagctttagcggcattattagtagttacattcattggcgttgggtgtatctcatcgctacaattgcgattgcgcttttaatccttctggcagccctcaaattacctaaggattcccgtccaaaaaacgggccaagctactggcagacaatcagttcaattccagggcttatcgcgcaccagcggctgttacgggaagccgccatcaacggttttttcatgtttgggacacttagtattttctggtcgacactcattttctatatggccagtcccgcctatcgtctcggtagtggtaccgttggtctattagcaatccttggtgcggctggtgctttagctgcaccaattatcggtcgcttagccgatgctaaatcacctcgctttattatcgccactggcttattcatgatgaccatcagttatcttttattcttactctgggggcatttcatgccgattctaatgctcgggattgttttattagatgtcggaaaccagtgcggtcaggttgccaatcaaacccgggtccaaatgcttggtgaagccactagtagtcgcaacaataccgtcttcatgtttgcctatttcatgggtggtgcttccggttcattctttggcgccctcgcttggagcttcggtggctgggtcgccgtttgtctcttagcgctagcttatcaatgtctcgctttaatcgcccactttattctttatcgtcctaaatcaacaggttaattaatggccggtgtaacgttctcaattccgttacaccggctttttgatacctatcagtaaagcgtattcattgacagttgcatgttacgtatctaacatagttattatatagcaataaatttccaatcatcacaataggaggttccttatgacacattatctaacgtttgatcacgtttcaaagctctatcgcggtgataacaaagccgttgatgacatcagttttactgtcgacaaaggcgaattcatttgtttgattgggacgtctggttctgggaaaacaacaaccatgcggatgattaatcgcatgattaacccaaccaaaggaacgattaccttagatggtgaaaatctcgctaatgtagaccccgttaaattgcggcgaaaaattggttacgtcattcaaaatattggcttaatgccacacatgactattcaagataacatcacaattgtccctaaactcttaaaatggtccccagaaaaacgccatgcaaaggtgctcgaattactaaaattagtggaaatgcctgcggactttttagaccgttacccaagccaattatcaggtggacaacaacagcgaattggggtgattcgcgcacttgcagctggacaagatattattttgatggacgaaccatttggtgctctcgatccaattacgcgtgaggcacttcaagacttagtaaaacaacttcaatcagaactcggtaaaacaatcgtctttgtcacccatgacatggatgaagcactcaaattagcgtcacgcattgccatcatggataacggccaaatcatccaaatgggaacgcccaatgaaatcttgcgaaatcctgccaaccaattcgtcgaagacttaatcggtcacgatcgtttgatcgaagccaaaccaaatgtcgaaactgttggccaaatcatgcttaaaagtccagtcgctatcacaccaggtaaatcattagttgatgcgattcgcttaatgcgccaacgccgcgttgataccttactggttgtcgacgaaaaccaacatttaaagggactcgtcgatattgaaaatatcgaccatcattacaaagacgcaactagtgttggtgacattatgtctaccaagattagttacgtgaacgaaaatgatttggtccgggataccattgaacggattcttaaacggggctggaaatacgttcccgttatcaacgatgatcatcaacttgttgggattgtcacccggacagccctagtcgatgtcgtttatgatgctgtctggggtgatactgacgaatctgaagcagaatccgaccaacaatagaaagggaggaatcgatgatgctcacttttttaacagaacatggctctgatttactgattaaaacttgggaacaactctacatttccgcaatcgccttagttctgggcataatagttgcggtgccccttggaattgccctcacccgatttcctaaaactgccaaagtagtgattgccattgccagcatgctccagaccgtcccctcattggcactattggctttaatgattccgctctttgggattggcaaagtaccagcaatcatcgccttatttatctactcactactccctattttgcggaacacctacatcggcatgaacgatgtcgatccgattctaaaagatagtgctaaaggaatgggcatgacgccggtacaatcaattatgcaagtggaaatcccaatggcgacccccgtgattatggcaggaattcgcctatctgcggtttacgtgattgcttgggcaacccttgcttcatatattggcgctggtggtcttggcgacttgattttcaacgggttgaatcttttcaaaccggatttaatcatcggcgggacaattcccgtcacattgttagcattgctagtcgattttggcttgggccggttggaaaaacaactgacccccgctgcaatcagataaggaggctcctatgcataaaatacgccgattcattacgagttgcggattattagttggcagtctcctcctgttaagtggctgtcagtcacttggcatcggaaaccgtcaatcacaaacaattcgcattagctcttcaagcaccactgagtcacaaattctcgccaatattctgagcgagttgattacccacgaaacacaaaataaggtcactttaattaataatctgggttcttcaacggtaacgcatgaatcactaattcgtggtgacgccgacatagctgctagtcgctacgctggaactgaacttactggtactttaaaaatgaaacctactaaagatcctgaaaaagcccaaaaaatcgttaaaaaagctttcaaagatcgttacaaccaaacatggttcccttcctacgggtttgcggacacctatgcctttatggtcacccaggaaaccgccaagaaatatcatttagaaaccgtcagtgatctcggaaaagtggcggatcaactaacagctggtgtcgattccgtctgggtaaatcacgaaggcgatggctatcccgcatttaaagaaacgtatggctatgatttcaagaaagttgcgcccatgcaaatcggactggtttacagcgcactggcggctggtaaaatggacgtcgttttaggttactcaaccgatggacggattaaaagttatgacttaaaagtcttaaaagacgatcgccgcttcttcccaccatacgatgcgagcgtggtcgccactgatcagattctcaaagaacagccagcactagcgccccttttacaccgtctagatggcaaaatcgacctcgacaccatgcaaaccctcaactttaaagttgataatgatctactagaacccgcagtagtcgcaaaacaatttcttcaggaacataattatttccggaaaggagccgctaaatgactaatttaaatacttggcaacaacttgtctattatttccagcataatggcagttatgttttacggcagtttagtcatcattttttgatttcgatttatggcgttttacttgccgcgttgattggcattcccttggggatttttattgcgcaccggaaaaagctcagtaatgttataattggggtagcgaatgtcatccaaacagtgccttcactcgcaatgctctcaatcattatgcttggcttggggcttggcacacgaaccgtcattgcgactgtctttttatactccttgctcccgattatcaaaaatacttacaccggtatggagaatgtttccgataatattatcgattccggaatcgggatgggcatgacaaattggcaactgttacggatggttgaacttcccttatcattggccgtcattatggcggggattcgcaatgccttagtggtcgccatcgggattacagcgattggcgcgtttgttggtgccggcggtttaggcgacatcattattcgcgggaccaacgccactaatggcggcgccttaatcttagctggtgccctgccaaccgccctgatggccattatcgctgatgtgacgttaggctttattcaacgccacttagaagctccacaagcacgaccttaaatctcaacattaggaaggtgtcactatgaaactgtatcaagcattaacccaagtcacactaaacacacaaatggttgacgatttacctgattttcagattacaaccgttttagaccaaccattgaactttgcccctactcagctttaccattatatcgatgccgttttaaagagcggttctcgtcacgatgaaaataacctgttatatgtcacagacgcgatttttatcactgaaaactacaactttaaacaaactgaattcgcggcacttgccacaagcttcgaagaacgggtaacattagcgcgtaaaattgtggccgatctcaaccgccacgtctccgtcaatctcgatttagtgcaacatgaattccaactaatttttgtcgattagcacgactgccccaggcgatgttatttctacatctactggggctttttttattgaaatgaatgaacaggagtcctcactttgccaaatgcacagcgtcaaaatagcgcgctttataaactcaatcgtcccgccaaccaactaacaacggaacaacaagcactacaagaacaagtcattcaattttgtttggcaaaagcgcacgccgaacacgccaccttcttgattcaaggtgcggccgggactggtaagagcgtgattctcagcagtgtcttcaaggtactgcagacacttgcgcgccaaacacccacctcgccactctatggcagtcaaaacgttctattggtcaatcatccagaaatgctaaaactctacaaaagtggcacaacaacggcccccgttttattgaaaaaagattttcaacgcccaacgacattcatcaatcaagcggctaaaaaccaccaacttgccgatatcgtcctcgttgatgaggcacacctactgttaaccaaatccgacccctatagccacttcaatcaaacaaatcaactcgatgaaattcgccgacacagtcggatcaccattctgatttttgatgaacagcaagtgcttaaagtgaagagcttctggcaacagcaacaactccgccaacgaattgaagctgctccccatcagaccgcgcaactaacccatcaatttcggatgcaagcccatccaagtgttgaaaattgggtgcaaacctttcatcaacaacaagtcgctgccctgccacatgatccacactttgaattcaaaatattcaccgatgccaatgagctctatcaaacgattcgctttaaaaaccaaacgagtgggcttgcacgcatgctagctacttacgattttccagcaacactcaatgatggtcacgatcacttcgttgagacatcgacattcaaattacgctgggatcggtatcagccaaccgctaaaacctattgggcagaacgtgaagatagtatagatgaagtcggatccgtgtacaccattcaaggctttgatctcaactatgccggcgtcatcatcgggccatccgtcacgtatgatccacaaagtgagcggctagttattcatcctgaatattacgaggaccaagccgcatttgccggcgcagcacagccggctgatcctgaagccgcgaaacagcaaattattcttaatagcctctacgttctaatgagccgcgctagaaacggcctttacctctatgctgttgatcccgcacttcaggccaaattgctcagcttatgacaaatcgattttatttcccggggaataagtcggttttctgtctatctctatcgaaaacaagtaaactgtaagtagagattttaaactgataaaggagtgttttaatatgtctaacttaacgagttcatacacgctcacaaacggcgtgcaaattcctaaaattggcttcgggacttggcaaacaccagacggtcaaacagccgtagctgctgttgaagaggcgctcaaggcaggttatcgccacattgataccgcccaagcttacggtaatgaagggagtgttggtgaggccatccaagctagtggcgttgatcgttccgatttattcctaaccaccaaaatctggaatagtaatcacacttatgatttaacaatcagctcttttgaagaatcactcaagaaattacaaaccgactacgttgatttgctcttaatccactggcccaacccaattgcctaccgtgatgattgggaaacagccaacgccgaaacatggcgtgcaatggagatgctctacaaagctggtaaagtccgggccatcggggtcagcaacttccgtgttcgccatttagaagcgctcaaaaagactgcaacggtacaaccaatggtcaaccaactcttcttagcccctggcgaattagaacctgaaactgcccaatactcacgtgaacatggcatgttattagaagcttatagcccacttgggactgggaagattttcagtgtgccagaaatgcaagaattagcggacaaataccaacgctcaattccacaaattgcactacggtggtcattacaacacggcttcttaccattacctaagtctgtgcatgctgaatacatccaacaaaatgcccaagttttcgacttcgaattagccgatgaagacatggctgcaattgatgcacttgacggcgtcgttggacacgcgcaagatcctgatactgcaacattctaaaactgtttaaaagccactaacacagtggcttttttcgatacagatcaacgtcaaaatgtgacaaagcgtattttagtttagatatttaacaatttagtttacctcttccctaaattatggtattttcattattattgaatccgataaaatcggactaaagcccgacgttatttaccgttttaagcttgagaatggtaaaatagaactagttagttaagaaatggggaattattttgtcaagtggtgagttattcactaatctatttgttatgttggtcaccttctttttagccgccttcttcgtggccgctgaatttgcgctcgtccaaacacggccaagtgccttagaagatgccatccattcaggaaatggtaatcctaaaaaattgaatcttgcgcttaaaatgacgcaaaacttaaacgaatatctctcaaccacccaagtgggggtcagtgttgccgggattattttagggtggattggtgaatcaaccgtcgaaaccattctagtcgatctgctcggtctcactcacctgatttcaaatggtggcttacacatcatcggcgcagttgccggcgtgttagtcttaacctatttagaagtggttttcacggaaatcgtgccgaagaatattagtattgatattccaatgcagatgttgatggctgttgctaagcccctccattactgtcatattatcttctatccatttgtttggttactcaacatttccgcaacgggtgttgtgaaattaatcggcttttcacctgctgaagaaggtagtgatgtgctttcccaagcggaaatcattagtctctctaaaaatgccgtcactggtggtgaattagatcgcaacgatttagtttacatgcaacgggcctttgactttaatgaccggattgccaaagatgtgatggttgatcgcacaagtctctacgtcgtcgatatcaccgataccgttaaagacgtcttaaaagactacttacaacaaggctttagccgcttcccagtggttgctgaaaatgataaagacaagattcttggttacgtctacgcatatgatttagtccgtcaggcacaagtcgacgattcaatccgcgtcagcaaattactgcgttcgattatctccgttccagaagcaacccctattcacagtttgttgaatcaaatgatcaataagcaaaccccaattgtggtcgtcgttgacgagtacggtgggacgagtgggattgtcactgataaagatatctatgaagaactattcgggaccgtcaaggacgaaattgacgatgtttcagatgaatacatcatcaaagaagacgataaccgttaccgtgttagtgggaaaacgacgctctatgatttcgaacgtttcttcaagactaaaattgatgccttcgaagcctcagatagcgtgaccctggccggttatgtcttagaaaacttcaccgacttacaacaaagtgcggtcattcatatcaatcaattcacattaaaagtggtcgaattcaatcgcggttacatcgactggtttgaagtctccagcgaaccacaaaataatacagccaacaatacaattattgaaaccaattaaaaaaagagtgtgctatcagccatctcctgaggattaaccacaaggagatggctaatagcacacatttaaacaaaaacagccttgcgcaaatgcgcaaggctgttttttaatttcgttatgctaaataatcacgactccagatgagccccattactttttcgccggtgtgcacgccgaccacaggaccaatgtgactcgtttcaatcggcatccctgggaatgtttccgtcaacgttgcgacccactgcacactttcttctggattattaccgtcaatcacgctaacgcgtacgggatagtcaacagattcgactgctgctttgaaatccgctaatactttttgaaaggcccgtttcttggtccgttccttcgttaaggcaacaatttggccggcatcgttaaaacttaaaatcggtttaatccgcaaaagattcccgacaaaggccgcactattcgaaatccggcccgttcgcaagaggtggcttaaatcatccacaacgaaataaacgcccatcgttgctcgtaaagctaccaatttcggcatgatagttgcggcatgttcaccttgggcaactaaccgcgccgcttccaaggccaagaacccttcaccggcactcgtaatcttggaatcaaaaggatacacttcgatgccttcaaccgactgtgcgtaggcggttaggttattgacaaagctcgtaatgccacttgaaagatggatacaaatcacttcatcgtagcccgcttttatcaattgatcaaaaacctgttgcatctgacccattgtaatttgcgaagtcgttggtaatttttcagtagtgcgcattttatcgtaaaatgcttcactcgtgatatcgatattttccaaataagtttgttgtccaaaaataacggtgattggtaccacagtaatattatggtcggcggcaacttgtggatctaaatacgccgcactatcagtcacaattgctgttttcatgtcaggctcctcaataaaactgtttttgtcattatcccaccaatgtggataaagtacaaatgaacaacaaaaaacgccggaccactttctgcccgacgccacagttattaatgagtcattgattcattctcaaatacgacaatggagatgtgcccatcaattaagccactgttattactcaaggttaacatttgattcttttcgttaacgtctaatacttcatgttcatcaaagtagccagctgcataatctttgtagtaaacagcccctagatttgattcaaattcatctggataatctttaatgtcagcatccgctggtactaatagcaatctaaagttcgtatccaacgagcaataaccaacgtttgaaaatggaccaacaccgtcatctaagtccaataaaattttttgacccggtgtcatcttatccttgattttcgcaactgctgcaggtgttatttttaatgccatatcaatcatccctttcatgcttccagtctaccgccgttttaaatttgacacaatctatctgctcagccagtgtgctacaataggcttaaccgtttatttaaggaggtcattatgcttttttatcggtattcatactttagcaatcagaatgatttcgaattctatctcaaactaagtctgtcagtgatcatcgccagtttaatcatcatcttcttcgttcaatatctccgccaccgttcagattcgaagtaccgtgacttactaatcatcttcggcttagttgggattttactcgccggcattcaatatacacggattcaacagcttaacaccgcccactcgcaacaagctcagatggcgcaattcattagaagtgtggcgactgcgcagaaagctagccttaaaaccgtcgcagtcaacacgacttcgcttcagcaaaacatggtagtgcgcgtcggtcatcaaaactaccaagtcatatttgataacaattttactagttatcaactccaaaaagctcagttgattagccaagacatcacctatcaagattaaggagtttactatgccatcttatttcgatattaccattaaattaattttcggtttcttctgtttagtgttacaaatcaacctctctggcaaggggaatttagcccctagcagtgggattgatcaactccaaaattacgttcttggggggattgttggcggtatgatttataatgccgatatctcgctcttacaattcttactcgttttactcatctggaccttaatcgtcttcacaatgaagtttctaaccactcacaatcgctggattaaacgctgggtaattggtaatccacaaacaattatcaccaacggccacattgatattcaaacggcctctaagaatagtttatccgcacaggatctatcgtttaaactccgaattgccgggattagcgatattcgcacggtcagtcgcgcaatcttggaacaaaacggacaattaaccattacgcaaaaaggcgacgccacgattaaatatccgctgattatggacggccagattaattcagaagcacttgaattaatcgatcaaactgaagaatggctcctcgccgacattcaacagcaaggctacagtcttcaacaaatctacatggctaactacttgaaccatgaaatcgtgattacgccctattaaaaaagatgacccgcaaaggtcatcttttttaatgtcgtactctttggagaagcgttgcaaccaaccagacaatcgccccgccaattaaaacaatcgtgcttgtcttcaaaccataatccagaacagccaacccatagtcggtaattgtttgattaaaatcgcccgctttttgagcaatttgttcaacaatgccactatatttaaacgcagccgcccctaatgccaagaataagccactccaagcaaaacttgcaccaacactccctaatacataccggaattgaccacttagtccccattgaactagtacaagaacaattcccataataattgcaacccaagttaagatattgatcacatttctaacaaacaacatctcagtcgctagtggtgctaagtaaggtgcttcaatttggttcgtgaggtattcttgtagtggtggttgaaccgcaaccactgccgttttaattaaagattccgtcaacgcattttcaggcacaactgcttctaaatgagttgcaagctgtcccatcatttgtgctgtgggtaacggcttttcttgtcctgtataaatattatgaacagttttctttaaatcggcctgcacatcagattgagtcagtaatttgacttgtacttcagttggtagcccatttttttgtgccgcatctaataaaacaacgttaattttatcagtcatcgcagctaacgtcttcggttcactgagctgttcttgcgtaaatgattctctcaaaactgtcaggctgagaatcatgccaccaatgccaaggaaaacgcaaagaaagattaagaacgtcaaaaagcgacttaaacctcgatgtggtcgcacgcttggttgattttgattcaaacgactaattggttccattgattaaacaccctttctattcacgaaccctattaaacttcaagactaggattcttaatcattaaatgctaaagtgaacttatcagtcacaggaggccattcaatgttaaaaaatttaacgattctctatatttcaattgctggtaatacacgttcatttgtaacggatttacaggattatgcagcgcaacaacatgctaataacccagcgttaccaaccattaccctcacagaaatttcggatgcgaccccctttaaagcggagaccgaaccgttttacgcgttcgttccaacttacttagatggtggcaacggcattgataatggcgttaaagaattaatgaccaatagcttaggcgaatacatcgattatgcgcagaacgcacgcctttgttatggagtaatcggtagcgggaaccgcaacttcaacgaacaatattgcttaactgctaaacggtatgcggtccaattcgatgcaccgtttatcgccgattatgagctccgtggcaatgcgaaagatgtcgcgcggatttataccttaatggtcgctaacgcgcaacagcatgcctaaaatttaagattagccggtaatgatgtgattaactcgctgggttgttggacaatttggacagcacccgcctttttgagttccgcgattgtgccaaacccataactaacaccaactgcattcatcgcgttttgcttagcgcccaagatatcattttggcgatcacccaccatcagtaatggtgcggtttgtggtgctagaccaagttctgataatgcgtaagtaatgacatccgcttttttgacccgcgttgtctcatcaacacttgctccaaaaacaccgctaaagtaatcacttaactctaaatgatcaatgaccttcttagcgaatggttctggtttcgaagtcgcaattgccagttgtaaatcctgtgcttgcaatgccgctagggtttctcgcatgccaggataaagttgattttcatacaaccctttaggcgcataataggcttgaaagactttaatagcttcttgagtagcagctgcatttaaaccaaactcacgcataattgtttcattgaggggtggcccaatgaatgtgaccagttcagctttggtttgcgtcggcaatgataactcctcaatcatatattccaaggcgttcacgatgccttcttgcgaatcggctatcgttctatccaaatcaaataaaacggtcccctttgtcatatcaatcatctctcgatctcttataaagtaccttcattttagcatactctttgacccttaaactttccttattgcttttttcataaatctataaacctctggtcacaaaatcttcacaaattcccattatagtattgagtatagaaaagcgaatcttttctatttcatactacttaactttttcattttactcctccaaagtaaaattaaggtagacgcaatctaccacgcacgtattattcccccaaagtaatacgtgtaccccttactcctttttagatcttcggatctgctagaaaccagtctccccaaggctggtttttttgtgtccccatcaaaaaagccgccagaacaatttacgttctggcggcttttctcatttttaaagtaggtactgttgcatcagttcaacggttttgagctgggcatcgtctgatactttatgttgcccattttcttccgtcgtcaatgtcactaatgcggtggctgaacttggttgcgcctgaatttcggtcataaaatctgccgtgaattgatatggcaccatcgtatcagcagttccatgatagaaatgcaatggacgacctgccaagtgatcaacgtgcattgataagtcatacgccgctaaccgtgctaaggtatcttcaatcgcatcttgatacttggtttgtaaggccgttggtaattgactaacctgccatttagcaagtgcgacaggcattggtgcgccaatcttatcaacgccaattttgacattcggatatcgggtgagaatcgcatcggttgtaatgccacccatcgaagtccctgtaacaccaatccgttcaggatcaactaagccttcagcactcagtgttgcaaccagttcaccaaactcggtgaccgactgcatcacaatatcccaaaattcaaacattaactcagaaaagagctgactaccatgtcgtttaccatgatacttcgcatctggtaagaccacgcgaaaaccagccttggctaaaaagtgggcgaccattaattctgactctttacggtgcgtccaaccatgatatacaaagacagttggtaataccgctttttcttgaccacttggggccacaatcaacgtactgactgccccaatttgccgttcttcagtgctaatcatctcaaatcctcctcaattgccatttatttcccgggtaatattaaccgaagaatgaacctgtaatcttaaaacggcgtttgatataaatccgcacgccgattaagagtgctgcaattacgatttgaacaagtggtggcaagactggattcaagaaacttggaatcaagattgtcacaccgtatgccgcaacaaaggctagtgttaagccgattacaaccaatgccatcttccaaaatggtggccgttgttcttttggcatttgcgtatagcgcattggataagtcatgatgatccccgcaagcgcagccgtaatgacaattgatgtaatcccaatgctggttgctgaccccttcgttgagaaataagccgcaattccgttaaaggctaggtacataattaaaaagattaagccgttatcaagcatttggagttgaagtgatgtttgcttaggacgttttggcgcgtgcaacaattgatcaatcttggttgtcactggaccatatacttgtgttgcaggcttgcccttatgttgttctgctaccatttctggtaacatttctgccaagatttcagtttggcgttctgctggcacttgttcggcatttaatgcgcgtttgaacttaaataaatagtccgcatttttcttactgagttttgcttctaacccttcaatatcaactggttctggggttactactggttgttcgttcttagccaattgtcttcctcctcaattatcattaaacgttaaatctaaattcgatgatgtcgccatcttcgaccatgtattctttaccttctaaacgtaaacggccagcttctttaacagcttgcattgaaccgtattgatctaaatcagcaaaagaaactgtttctgcccggataaatccgcgttcaaagtcggaatgaatgacaccggcggtttgtggggccttcatgccttgacggaaagtccatgcccgggtttcttttccaccagcggtaaagaatgttgctaagcctagtagatgatatgaagcacgaatcaatttatccaaccctgattcagtcaccccttcggcttccaaaaattcagccttatcggcatcatctaatgaggcgatttcttcttcagttcttgctgagatggcaattacttcggcgccttctttagctgcggacgcttgaatttgtttaacataatccacactatcaggatcagccatggcatcttcagcaatatttgcaacatataaaaccggttttgatgttaataagaagaagcctttaactaacttcgcttcatcttcattaaattcgattgaacgtactgagccgccttcttcaagaacaggcttaatctttttaagcacttcgaattcggctaaggcgtctttgtctttcgtccgcgcaatcttttcaacacgcgcataacgcttcgtaacactttctaaatcagctaagctcaattcaaggttaattgtatcgatgtcgtctaacgggtcaacagttccggtaacagaggtaatattatcgtcgtcaaaggcgcgcacaacatgcacaatcgcatcgacttgacgaatattctccaagaacttgttcccaagcccttcacctttgctagcccctttaacgatcccagcaatatccgtaaattcaaaagtcgttggcacgatctttttagccgggataatttcttgaatccggtctaaacgcttgtcagggacttcaaccatgccgacgttagggtcgattgtggcaaatgggtagttcgccatttcggcgcctgctttcgtgatggcgttaaataacgttgattttccgacgttgggtaatcctacaattcctgcggttaatgacatagttttttacactttcctttactttaaaaattagtttggttgggaccttgttgcatctcttgatagtggggttcatccgcaacaacgacttgtgctgcaggcaccaaattcttcttaagtttcttttcgaattcacggcgcggtaataagacggcgtggccgcaccccatgcacttaattcgaatatccatccccaagcgcaccacttcaaagcgattggtgccacaggcatgttgttttttcatctgaacaagatcgcctaatgtatacatctagctcgactcctcactttaatcgatattcacatctagcaatgcaagaatccggtttaaatcatcgactgtgctgtaatcaatctcaatctttccgcgacccttgctgttaatcgcaatattgaccttggtgtcaaatttatcgaccaattgattttcactcgcttgaatatagggtgatttaatcttggtcttcgtcactttcgcagctttaatctggttcatctggttaattaactgctctagttgtcgcaccgttaagccttcatcaatcgtgcgtttcgctaatgcactaatctgactttttttcttcaatgataataacgtccgcgcctgtcccattgaaaggtcaccattttgtaataacgtcttcacgtcattgggtaaacccaataagcgcaagtaattggcaatgtatgggcggctcttgcccaaccgttctgatacttcagcttgagtcaggtttaactttttcaagagtgtatcgtaagcttgggcttcttctaacggcgttaaatcttcacgttgcaggttttccaagaccgcaatttccatcattgcggattcatcaaactgccgcgtgatggctggtatcgctgttttaccagctaacttagacgcacggaatcggcgttcacccgcaattaattcgtaaccattaatacttttgcgaacaatgattggttggaaaacgcccgacttcttaattgacgctgctaattcagccaaagccgcttcatcaaatgtcttccgcggttgatagggatttggacgaatatcatcaagtgcaatctcttcaactaattcatccgcccggtttttattagggccttcgaacgctgaaaatacagcatccaaaccgcggcccaatccttttccatttctagttgccatgagctgctaacacttcctttgccaaattttggtaaacttcagcgccccgtgattttggatcataatcaatgattgatacgccatgactaggtgcttctgctaagcgcgtattccgtggcacaatcgtgtcgtaaacccgatcaccaaaatacttacgcacttcttcaatcacttgagcccctaaattcgtccgcgcatcatacatcgtcaacaacacgccttcaatcgctaagtttgggttaaaatgtttttgcaccaaacgaacggtgtttaacaattggctcaatccttctaaggcataatattcactttgaactggaatcatgattgaattacttgccgtaaaggcattgattgaaagttgccctaatgaaggtggacagtcaatcaaaacgtaatcataatcggctaagactggttctaaccctaacttcaagcgcatttcacgcgccatctgtgatgttagctcgatctctgcccctgcaagttgaatcgtagctggaacaatgtctaagttcttatgtgatgttttaataattgtttcttttagtgggaattcatcgaccaacacatcatagatatctttttcgacttgggatttttgaaccccaatcccgcttgtcgcattcccttgtgcatctgaatcaatgattaacacgtgattgccagcatccgccaaacaagcgcctagattaatcgtggtcgttgttttaccaacgccacctttttgatttgcaattgaaataacgtgtgccataatgagcctcccttattgctttggaatttcgatcgtaatccgataaacatcatcttgttcttcttcggtggctttgacggcaatcccgctttgttcaaccatttgaaccgactttttgatggtgttgacggcaatgcgtgtatcatgggcaattgctttttttgctttatcgttcgctttttttgccttcgtggtagcttcttttaaactgtcatcggttgcatcaactgtctcttcagttgattctggttcaggattcaacgtcttgttaaccagcgcttccgtatccttaaccgttaattgttcagccaagatttggtgtaaaatcatttgttgcttgaattcatccaaccgtaaaaggctccgaccgtgtcgttcagaaatttcatgattcatgatggcttcttgaacgggttgtgagagtttcaatagccgcaacttattagcaacaaaagattggctcttacccatcttttctgccaagctggcttgtgtgaagtcgttcagcttcattaagtccttataagcttgtgcttcttcaacggcggttaattcttcgcgttgtaagttttcaatcaaggccattgaagctgtttcgtgatcatccatagtttgaacaatcgctggtaattcagcccatttgagggtttgaatcgctctaaaacggcgttcacccgcaataatttcatatttttgatcttcatattcacgtaagataatcggttgcaataagccgtgttgttcgattgtgcttgctaattcggcgatattgtccgcattaaatacttttcgtggttggaaccggttaggcacaattgctgaaaccggcactttgatcacttgattaatacttttatcgtcttttttcttattaaaaaatgagagtgccattatttttcctccttagccattaacggttttttaactggcacaccagcccgccgtggatacttggcaggtgtcggtacaaccttatcaattacgattagatgtcgttgatcatctgtttctggtagcgtcaaagcaatgtcttgtgcaaattggccaccaagtgtttcgattgcatagttggcttctgccaattccgtttcaccttgactcgcttttaatgcgataaactgcccaccaactttaacagttggtaaacagaattctaccagtacatttaatgaagcaacggcccgggcagtcacaatatcaaactgttcacgatatggactcttcgggttgctgaacagttctgctcgatcatggaccaatgtcacatcagacaagcctaattcacggaccaattcttctaagaagtgaatccgcttgtttaatgaatcaacaatcgtaatcttcaattgcgggaataaaattttgattggtaacgatggaaaacccgcgcccgcaccaatatcgcagatcgtaaggggttcagtgcgtagtttttcaagatacaaagttggtgtgacagaatcgaagaagtgcttgagataaactgcttcttgttctgtaatggctgtcaaattaacttgttggttcacttgtacaagccgtttgaaatacaattcaaactgatccatttgtgcttgtgaaacttgaatattgtatgtttttaacgtcgctgcaaaacccgctggtgtcattatttctccttaactatgctttaaagtaggcgtttaattcgtggaacattattgtttcacatataccttttagtttaacgtacttaccctaaaaaaacaagattcttcccagttttcagattatcgtttcatgtgaaacataataatcggtaatttaagaacaattatcgcctttttcaagcgaatcattcagtaagaaagcacttttgtcatcgaacagttggtgtgcatcatcacaaaggcgaactatcgcgattatttaagaatgttatattcgttttttacttaatttctaattgaagtcactattggcgtgtgctaaactaaatgttaactaaattttaacgattatcttggagggacactcgtggcagatatacactcaaattcagcacagccaattaatccaaatgaaaagcttccccacattaaagcagcgattctcggcttacaacatcttctagcaatgtattctggcgatgttttaattccattacttgtcggggctgcattacattttaataccgctcaaatgacttacctcgtttcagtcgatattttcatgtgcggggttgcgaccctattacaattaaaacgaaccccactgaccgggattgcattaccggttgtcctaggttgtgctgttgagtacgttggcccgttagccgccatcggcactaacagccaactcggaattgacgttatgtacggtagtattattggcgccggaattttcatcttgttagtttctggcttgtttgcacgtttgcgttggctcttcccaccagttgtcacagggtctctcattacattaatcggattcacattgattcccgttgctttccaaaacttaggcggtggcgatgttgctgctaagtcgtttgggagtacaccaaacttaattaccggtttttcaacgattgccctaatcctgatttttagtatctgggggcgtggcttcatccaacaaatcgccattttaattgggattattgctgggaccttaatcgcagctgcgattgggattgtgtccttagatccagtaggtcaagcaagttggttcaaattacctgaattattctacttcggaacacctcgttttgaatggtcatcaattgtttcaatgtcattggctgcgttaacgaccatgattgaatcaatcggtgtcttcttcgcccttggtgaaatcgttgggcgcgacattactagcaatgatcttaagcggggcttccgcgctgaagggattgccgctatcttagggggattgttcaacaccttcccttactcaacgttctcacaaaatgttgggattgttcaattatccggtatcaaaacgaaaaaaccagtttactactcagcattcttcttaatcatcttaggattattacctaagattggggccgttgcaaccattattccaagcgctgttttagggggcgcgatggtcgttatgttcggcactgttgggattcaaggcattaagatgttacacaaagtcgatcttgatgataaccgcaacttactagtcgctgccgtttcaatcgccttaggcttaggggtagcaattcatccaaccttgctccaatcactaccaacgagtgttcgcacaattctaggcaacggcttagtagtcggcagtctcagcgctgtcatcttaaacttactattcaactatcgttcattaattgcagcaaaacatgctgaacaaaaataaatcaaaaaaagtgcctacaaatttaaccgtttgtgggcactttttttgtctattcaatttcagttgtccgaatacttctagcaagtctatttgtcatttcaaacagctacattaattctggcatgctaattttcttatctgattcagtaatacttttaatgtaagtttcacacgcctgctcaaatcgacgataaattgattctccagcgggagaaactgctatatcaacaattcgacgatcatcctgtttgccatattgtttgctgatatacccctgatcctctaatttacgtaatttatttgaagatgctgcggtagatgtttttaatacttgtgcaatcttactattattaatacctttatagcgttttaatgtttgtaaaatacgaatttgttcgatggtaactccgtcttcatttaaaacttgactaatgtttgctgaaatttgagccatctcatgatagaaattaatcaactctaatttatcagtcgattgcgctatagaattcatcattcctcctccgtttcattcataatcctttgataaaactggtgccatcggctaaaatactgttgcaatgagaaacagtcgttaatcgtttgccgggcatttcgtgaatatgtttcacgtcgcatctgactacctagaaaatcactgagttgttgaactaagccagcgtcatctcctggtgtcaccaaatccccgttcacatgattctcaattacttgtggaatgtccccgacattcgtagctaaattgggaattccataagccatcgtttctaaaattgccattggtaagccttcttgatatgtgggcaataggtgtaacaggctttcttgaataacggtattgcgatccgccaaagctaaccagccaccaaggcgcacattggttaactttaggcggtctatttcttgctggaccttcccctgttcaccatcaccatacaacgtaaattgaatatccggaaaacgggattgaatcacccctgctaattttagaatatcgtaggtgcccttacgttcgcctaagcgccccagtgtgataatttgtttagactgactatggtatttgtattgcttaggtagttcaaccgcattagcaataatcgtaatcggtgtttgcgtaagtgtttggtaaaaagttgcccattcagtgcttaacacaacaatgccatccatagccacggaaaacaatgttaatattaattgaaattcactatagattcgcattatattaactatttttggatataaataaacttttaaatatctttagaatattctcataaaactaaagtaacgatgttatcattctatttctccctcccattattgtcatctaattaacgaatatcagttaatatgcccatcaaaaaaaccatcataattaaagtttttactttaattatgatggtttttttaagtatttcatttacgataatattcactatttattaaaaatagtcattactattggtccgcatacgaaattgatgagaacttattaaacgttttgacaaataataatttgactgtccctcgtgcacccgcacggtttttttcgataatcacttcaacttctccaacgtccgcatcatctgactgctgtggcgctggtgctggcggattgccaccaccgaaatcatcgccatcttccctaggttcatcgcgatagtaatcatcacgatataagaaagcaacgatatcagcatcttgttcgattgatcctgattcacgaatatctgaaaggactgggcgtttatcttgtcgttgttcaaccccacgagagagttgagagagcgcaatgaccggtacccgtaattctttagccaatttctttaattgacgtgaaatcgccgagacttcttgttgccggttttcttggccggaaccttcaattagttgcaagtaatcaatgacgattaagccaacgccccctttttccttcgctaagcgccgacatttcgcccgaatttccgccattttcacgccgggcgtatcatcaatatagatattcgcttttgaaaggctccccatggctacgattagattctgccattcaagttcgtcgagttgcccggttcttagatggttggcgtcaatacttccttctgcacacaacatccggttaacgagttgttcagcacccatttccaaactaaaaattgcaatattctcattggttttcgtcccgatattctgagcaatgtttaagacaaacgcggttttccccaccccgggccgggccgctaaaataatgagttcatcttcatgcaaacccgcagtaatcttatctaaatcgcggtatcccgttgatagacccgtaatgtcttcttcattttgatataacttatcaatttgttcaattgaactcgttaagacatctgaaattgatttgaacccggccttattttgccgttcggaaacatccatgatttccttttcagcggtatctaaaatatccgtgacgtcttcatcttgcgcgtaaccctttgccacaatattttgagcggtttggattaaacggcgcagcattgctttttcagagacaatcttggcataataaactacgttggctgccgttggtacagcctcagccaactcagctaaataaccaataccaccgatatcttccaattggttctgcgcatcgagggcactctttaaagtcaccgcatcgattccttcaccccgttcgtttaattcaaccatcgtctcgaagatcaaacggtgggctttacgataaaaatcgtcggcagtaacgtattccattgcttcaacgagcgcatcgccactaataaagacggcccctaaaacggcctgttccgcctcattattctgcggcggtacttgttcaattagttcattattcaccatttttactcctttggttaatcgacttcaattactcactagtttactcaaaataccagtgactggcaacagtcaccgattggtcagcaataaaaaaagccgtgatagtggtgctaatcacggtcttttcaatcattcattttattattcggttacgatatgcacacgaatcgtagctgttacatcagggtgaatccgtacatcaacattccggtaacccaacgctttgattggttctggtaaatcaattttccgtttatcaacattgatctgatattgttgagccaatgcttgggcaatttgcttgcttggaattgaaccaaataagcggctgtcttcgcccgctttagatttgatttcaacgattgttttatcgtcttcaattttggcttttaaaacctttgcttccgctaattcagcagctgcatttttagcttcagcatgttgttggccttttaaagcactgatagcagctgatgttgcgggttttgctttcccatttttaattaaaaagttttgtgcgtaaccatctggcacatctttcacttggccttttttacctttaccgcgtacatcttctaagaaaataactttcattgttctgaccaccttatctaattaatcgtttgttgcttccttgtccgtttccggatcaaatagctctgccaaaaccgttaataacttcgccttggcttcggaaacagtcgtatctgccatctgcgttgccgcattggaaagatgaccaccgccacctaatttctccataatcacttgcacattcacatcacctagactccgcgctgaaatggcaatcatgccatctgggcgtttcacaatgacaaacgaggcttcaatgtctgacaatgacagcaaggtatccgctgcttgtgctgcgatgaccggatcgtaggtacggttgtcctcacccatacataatgccatatttggctcaaccatttcaatggtttcaattaaatgattcttttgaatataattatcgacattttcttttaacaagtgttgaaccatcgaagcatcagccccaactgaacgtaaataactagctgcgtcaaacgttcgcgtcccagttcgcattgaaaatgactgcgtatcaaccgtaatcccagccaacatcgttgtggcttcgaacttgttaatattagcgacattttgtggttgatactcaaacatttccgtcactaactcacacgttgaagaggcgtagggctcgatataaaccaacattgggttttctgggaactcttccccacgacgatggtgatcgatgacaatcgtccgctgagcaagcttctcgtacaacttaggcgccattgttatggatggtttagaatgatcgaccatcactaataaactattggccgttgctttttcgagcgcttcttcaggcgacaacacttccactgcaatttcagggtaggctttaacttcctctaaaagacgttgaatatctgtatgaatattgttttggtcaacgaccacgtagcacttcttaccgttcatctcggcaatccggcgaatcccaaatgaggcgcccaatgcatccatatctggccgaatatggcccataacaaagacttcgtcaacttgtttgaagatttcttgtaaggcttgtgaaatcatccgtgcacgaacccgcgtccgtttttccatcggattagtcttaccaccataaaaacgtgcttgtccttcactcgctttgacaacgacttggtcaccaccacgaccgagggcaagatccaaattgctctgtgaagttgttgctagaacggctaaatcggattccccataagcaaacccaacactcaacgttagtgggaagttttgtttggatgtttcttctcgaatttcatctaaaatcttaaacttctcttgttcagcggcgtgtaatgatttggcgtacgccaaaacaaagaaatgatcatcatcaactcgcttcaagaacatctgaaattgattcgcccagcgtgataactcgttggtgacatagttattcagattagaaacagattgatcatccattgtctgagtgatttcatcataattatctaagaacacttgcccgatggctacttgctcatcttcataacgatcttcaatggccgcatagcgtgtaatatcgagaagataaaccaccccaatgctttcttggataatgatttggaattgattatcgccccaacgaacaatttttgtttcattagcatcttcattttgtgcgactaattctgccaactctggatcgacagacttaatctttttgcctaaaacttctttattaccgaaatattgctgtaaataaggattcgtccattgaatctcacctgattcgttgtacaataaaatcccaattggcatcttaattaaagcctcttgctcgccgcgcttaatgcggtacgacaagtccgagacatacttggctgtattctcagtgaccgtttcgatcgcgtatagcacagtaatgaccgtcccgattagcagcacgaataaaattagagcaattagccaatctaacatcgcagcaaataccaaactaaccgctgtaaggcccaacaaaatcagggcaacggtccgcaggcgagtatcatctaaaaactgtggtaattttaattgtttaaacttatttttcatgtaaactccttaattctagatcccattctgattcttgttcatctatcattgagtctatgtggttctttactaaaacttaaaaaatactacttttattttagcacaattgccctacaattaccgctttgaacccgtaatttaatcccatgttcccctattaaagcgcacaaaaaaagacctgctaaacagtgtttagcaggtcttttggttgactgattagtcttctgtaacgaatggtaataagcccataatccgtgcgcgtttgattgcaattgtcaaacgacgttggtttttagcacttgtaccagatacccgacgaggtaaaatcttaccgcgttctgagataaaacgtttcaataaatcagtgtctttgtagtcgatatattcgatgtggttagcagcgatgaaatcaaccttacgacgacgacggttgccgcctcttctttgttgagccattgaaagttcctccttccaaaacagtttattttagaaaggtaaatcatcatctgaaatatcaattgcttgaccattatttgcaaatggatcggcttgagtgttatttgcagctgatggattacccgattgttgagggctggtaaatccagattgttggctaccattgctttgattgttgttaaagttttggcttgcgccatccccttgccgttgctccgttgttgtccgtgattctaacaatgagaagttatcaacgaccacttcggttacgtatacacgttgaccttgttggttttcataatttctcgtttgtagacggccatcaactccgactagtgagcctttcttagtgaaattagcgaaattttccgctgatttacgccagatgacacagttgataaagtctgcttcacgatcaccattggcattcgtgaattgacggttcactgcgattgagaaagtcccaacagcagcaccactagaagtgtaacgtaagtcaacatcgcgtgttagccgaccaacgagtacaactcgattaatcattctgtcagctcccctctattcaataattacaattcaaaattagtcttcgcgtttaacgatcatatggcgtaatactgagccatcaatcttagctagacgatcaaattcgtttaaagcttcatcattatcagctaaaacatttacgatatggtaaatgccttcgtgttgattgttgatttcataagctaaacgacgttttgaccagtcttttgaatcaatcacttcagcgccgttgtcttttaagatgccgtcgtaacggttgacaagagctgttttactttcttcatcaagtgttgttgagatgatgtaagtaacttcgtattttgattgagccatgactgttcacctccttatggactttaggttcttacctgtgtaagaacaaggagtaactgactaataaaaattagcctcacgatttagaccctgtgtctaaatcacagatactcacaagataaaattctatcataacggccgttaaaatacaatctaaaataaaaattgttgctgctaacacgcttggtaacagttgttacaagtgtatttacgcagaaacgatttttatttttttaatttaattaattttctgaatcttgatcatctgatgccgattgatcggcttcagcccgcgcgagtaattcatcgacttgtgctaagccagtatcagtagtgtcatcagttggtgctattggtgccgtcgttgcttctggtgtttcaggttcatctggttcagcttcgactttcgccattgttgcgaccttcgcttcgtcatccacccggattaaacgcacaccaagtgtggcccggccagtttgtgaaacgttagcgaccttgaaacgaatcaagacgccagtatcagtgattaagagaatatcctcttctccagtgacggcagcaatcccagctaatgggccgttcttttcagtgatgttggcagtcttaatccctttcccaccacgacccttgattgggtaatctgcaaccggtgtccgtttgccgtaccctttttcagagataacaaggatttcttgacccggaatcagtaagtcagagccaaccacatagtcgccttcacgtaaccgaatcccacgcacaccagcagcggttctccccatcgaacggacagctgtctcactaaatgacacagcataaccattatgggtcccgataaagatattttgttgcccatcagtcatcaagacgttacttaattcatcctcttcccgcaaggtcaatgctttcaacccattgctacggatattggcgaattcagaaacggatgtccgtttgaccgtccctaagcgggtaataaagaagagtgattgttcgtcttgcacttctttaccaacattaaccacggtctgaacgcgttcatcagaattaatgcctaataagttaatgattggaattcccttagcagtccgcccatattctggaatttcataccctttggcacggtaaactttcccagtattggtgaagaataagagcacttcatgagtcgaagtcgaaagcaagtgttcgatgaagtcgtcatcatggacgcccatcccttgaatcccacgaccaccacgattttgaactttgaattcgctggctggtaatcgtttaatgtagccgttatgcgttaatgcaatcacaacgtcttcttcttcgattaagtcttcgtcttcaagactaagcacttcacccaccaataattctgtccggcgtttgtcaccgaatttactttggagttcaagcaattcatcgtagataatcttcttaatgcgttctggtttggctaaaatatctttcaaatcagcaattaaagtcatcaaattattgtattcattttcgactttatcacgttccaaaccggttaatcgaactaaacgcatatccaagatggcttgcgcttgtttatccgataaatcataacgatccatcaacaagaccttagcggcatcacctgtattcgaaccacgaatgatctgaataatcgcatcgatatggtctaaagcaatgcgtaacccagctaaaatgtgcgcccgcgcttcggccttcttcaaatcaaattcagtccgccgacgaatgacttcttcttggtgcactaagtagtgttccaagattgatttcaaactcaagactttaggggcaccattcacgatggccaccatattaaatgagaatgaggtttgtaatggtgtcaatttgtacaggttattcaagacaactgaagcactcatatcccgacgcacatcgattacgatgcgcatcccatcacgatcagattcatcgtttaaatcggtaatcccttcaagccgtttgtcacgggctaattcagcaatccgttcgaccaacttggccttattaaccatgtatggaatttcagtgacaataatccgttctttgccgttcttttggacctcaacgtccactttagcgcgaagggtgattgtccctttaccagattcatacgcatggcgaataccagatttacccatcactaacccaccagttggaaaatcagggccaggtaaggcatccatcaaatcagcggttgtcgcatctggattatccatcaagatgtgtaatgcgctaatcacttcggctaaattatgcggtggaatattggttgtcatcccaacggcaatcccagtcgccccgttgacgagtaggttcgggaaacgggctggtaaaacagcgggttcgcgttctgactcatcataattcggtacataatcaattgtattcttattgatatcacgtaacatttcgacagccatcttgctcatccgagcttcggtgtaccgcattgcggcagcaccatcaccatcgacagagccgaaattcccatgaccatccactaacatgtaacgataactaaaatcttgtgccatccgcaccattgcttcataaatcgctgaatcaccatgtggatggtacttccccataacatccccaacaattctggcagatttcttgtaaggcttttcgggagtgacccctaattcattcattccgtataaaattcgacgttgaacaggttttaacccatcacgaacgtctggtaaggcacgcgcaacaatgacactcattgcatattccaggaatgatttacgcattgtcttagataaattgacgttttcaatccgaccgtcttggccaatttcgtttgccattaatctataaacccctctcagtcagtctttcaatgtgtccgtttaagcggcgaacacgctatgcatcgatgctctttggatccatgtaaacggcattttcttcaatgaaaatccgacgaggttcaacccgatcgcccattaacatttcaaaaatttgatccgcttcttcggcatcttcaacgttaacccgcaacatgcgccggttttcaggatccatggttgtttcccataattggctagcatccatttcccctaaccctttgtaacgttgcacttcaggtttaggacttggttggagcgtccctaacacttcttgtaattcttcatcagaatcaatatagcgcatcatcttcccttgtttaacacggtacaaaggtggttgtgcgatatacacgtaacccgcttcgacgattggtcgcatgtaacggtagaacaacgttaaaagcaacgtccgaatatgcgcaccatcgacatcggcatcggtcatgatgatcaacttatgataacgggctttagccacatcgaatccttggccaaaaccagtgcccattgctgtaaataaggtccggatttcatcattcgccaaaattttttccatgctagctttttcaacattcaggattttcccccgaattggcaagatggcttgcgttaaacgtgaacggcctgattttgctgaacccccagcggaatccccttcgacgatgaataattctgaaatagcaggatctttactactattatcggccaacttacctggcaagtttgagatttcaagaccgttcttcttccgtgtcacttcacgagcgcgtttagcagctaaccgggctttggcagccaatgagcctttgtcgacaatttggcgggcaatcgatgggttttccatcaagaacttcgtgaaatgatcagagaacatccgatcagtcaccgtccgtgcgtcggcattgcctaatttcgtcttcgtttgaccttcaaattgaggatccggatgtttaaccgagacaaccgctgttaagccttcacgcacatcttccccagaaaggttcgtgtcgttggcttttaagatgttttgcttggttgcgtagtcattaataacccgcgtgagcgccgtcttaaagccagattcatgagtcccaccttcgtaggtatgaatgttattggcaaaggtcatcaagttcgtccgataatcattcgtatattgcaaagcaacttccacggtaatcccgttttgttcaccttcaacatagattggttcgtctaaaagggtctcttttttgtcgtctaaatattcaacgtaactcttaatcccaccttcatagtggaattcaagtttttcatgtgtttcagcccgtttgtcggtgaacgttaacttcaagcctttgtttaagaaggccaattcccgaatccgcgttgttaaaattttatcatcatacaccgttgtttcagtaaagatatcagcatcagggacaaaatgaactttcgtaccatgttcatgggctggtgcgtcaccaatcatcttcattggcgtttgcactttcccccgcttgaaatcgatgtagtagcgtttaccgccttgagtaacaaccgcatctaattccgttgacaaggcattaacgaccgaagccccaacaccatgcaacccaccagatactttgtatccgccgccgccgaattttccaccggcatgcaagattgtaaagacggtttcgagcgcagacttaccagtcttagcttgaatcccaactggaatcccacgcccatcatctgtaactgtaatactattatcgggttcaacaaccacgttgatttctgttgcaaaaccagcgagtgcttcatcaatcccattatcaataatttcccaaaccaaatgatgcaacccttgggaactcgttgtcccaatgtacatccctggtcgtttacgaacggcttctaggccttctaacacctgaatttgactggcatcataagatttagcgcgttcttcttttgcttccatttgtgcttctgtctcttgattcatttgatcatctgccaagaaaaaaacctccgtttgatcgttttttgactaatttgctgctgcatcggccactgtcacggtgccgtttgtcacggtaaacacccgtggcgcactaataatttcttttttgacattttcaagactagttgtcgttaagaacgtctgcaccttattctggaacgttttcaataagtgtgtttggcgtaaatcgtcaagctcggacaacacatcgtccagtaataggacgggatattcaccggtttgttccttcattaggtcaatttccgccaatttaacacttaacgcggttgtgcgctgttggccttgagagccaaacgattgcacgtccttaccgttaaccaaaaataacacgtcgtcgcggtgcgggccaaccaatgtcgtgccctgttcgacttcccgtgtttggtgcgactcgtatagggtttgaaactgttggtataaaccttcggcatcaagtaccaactgctcatctggaatctgactttggtatttaaacgtcaaaacttcccgctctttggtaatctcttgatgcaacttctgcgcccacttctccatctgttgcagaaattcacggcgagcaaccgtgacttccgcgccataagcggctaactggtcggacaatacgcctaaatacactaaatctttagcttgacgtcgttgtagttgcttcaaatactgattccgctgtttcaaaatcgacttgtattgcgaaatgttatacaggtacttcgcactcatttgaccgaattccatatcgataaagcgtcgtcggacagctggcgagcctttcacgatattcaaatcctccggtgcaaacaagacgacattcaattgaccgatatattgggataacttagcctgttctaaatgattgaccttcgcttttttacctttttgactgaccaccaattctaatggtgtgtggccagtttgccgttgtaccaagccggtaatctttgcgaattcgccatcccattgtatcagttcacgatcattattcgtccgatgcgaacgagccaaagccaacacatagatggcttctagcaagttcgttttgccctgcgcattttcaccaatcaagacattgatatctggcgagaaatggacgtccacttgctcgtaattccgataatgatcaagttggagttcacttaaatacatagtcgcctacaatctttcttgttgtttaatgacaaactggccgttatcgggcacctcaacgacgtcttccagatataacttccggccgcgacgatcatcaggttctccgttcactaaaaccgttgtttcttttaaaaaccattttgcttgcccacctgtttcaatcacaccggcctctttaaggagttgcccgagtgtcacaaactcagcttcaagtttaatttcttgtgccatactcaacccaccattcttaacgatattaattactgcgctaataccgatctgttataccttacaattatagactttttttgccttaaaaacaaataaacacagctaaaatgctttctgagcgtttttaagtgctttaaccttatcctacttgttttatccgaaatcgctgtaaacgaatttattttaattttagcgcaaaaaaaaacgccccatttttaaatgcggcgttttttgattattaaaatgtccgaactggtgtgattaattgaatgtagtgttcttgatcttcacttgggaccaatgtaaatggccgtaaagctgccgtaaagttaatcacgatggttgtttgaccaaatgaacgtaaagcatccttcatataatctgggttaaatgaaatttcgagatcttcgcccgttaggttttcaaattgaagggcttcttcaacattcccaacgtccggtgagttcccgtagatgattgccgtgttgtccgttgtattcaatgtcaaccggacaacattgttccgactttcatgagacaacaatgatgcccgttcaatcgcagctaataagaccggtgcattgaattcgatttgtgtacttgaagaagttggaattaaacgtgctgtgtcagggtaatttccttctaacaaccgagaataaaaggctaagttaccggctttaaagagcacttggttttcagcaatccgaatttcaacggtttcaacttcgtctgctaacgttcttgaaagttcaattaaactcttcccaggaataatgacatcgtagttcccatcacttggtactgaaacggttaattttcgttgtgcaagtcgatgactgtccgttgcgacggctaacatttcgccatcttttaaaaccaaatgaacccccgttaagattgggcgactttcttggttagaaacagcgatgacggtttgatgaattaattgtttaagcacatcagtactgatactgaacggattttgtcccgcaatttcaggtagatgtggataactattagcatctaagccattaattgtaaattctgatttacctgaacgaatggttgtttggaagttgtcaccaacagcaatcgtcatttgatcttcaggtaattttttaacgatttcactaaagaagcgggctggtaaaacaatggcacctgcttcttcaacgactaattgattcttttcatcattactagcaagggttgcttcaattgaaatatcagcatcactaccggttaaggttaagccttcttgcgaaagcactaatttaagccccgtcaaaataggaatcgttgttttagctgaaatggcacgttgaacatcattaagggttttgatgaacacgttgcggttaattgagaatttcatggatgttaaacctccgaaggaaaatagatatatatattataaaagaattttaagtaatagtagtagggcctgtggaacctgtggataacatagaaaagcaaaagagtgtctagttttccacttgtggataagttgagaacaactcttaggataactttagcgtttatccacagcctatatttagccttttaaggtattcttcaaatctaagatggcatcttttagattttgatcactcgttaaagcttggctaattcgttcatgagcgtgcataactgttgtatgatctttaccgccaaattcttgtccaattttgggaagagaactgtcggtcatttcgcgggccaagtacatagcgatttgccgtgggagcacaatttctttaacgcgcttgcgcccttttaaatcagtgattgaaaggctgtagtacttagcgactacggattgaatcttagcaattgaaagttgactcgacttcccattgagtttcaagcctttaagggcatcggcggcaagactagttgtaatttcagcattttgcatggttgcataagcttgaacccgaaccagtgaaccttcaagttcacggacgttggaatcaatttgaccagcgatgtagctcaaagtatcttctgggatttcgaggcgttctgtgtcggctttgttccgtaaaatagcaattcgagtttccagatcaggcggcgtaatgtcgacggacaagccccatttaaaccgtgaaactaagcgttcttggagcttaggaatttcattaggtaaacgatcagatgttaagacaatttgctttttatcattgtagagatcattgaaggtatggaaaaactcttcctgagtcccttctttatccgcaaaaaattgaatatcatcgaccaataataaatcaacgtttcggtattcttggcggaatttttcttgattcttcgtttgaatcgaattgatgaagtcgttggcaaaagcttcactcgtcacatacttgacgtttgtgtcaggtttagagagtaacagctggtgaccgatagcttgcatcaaatgggttttacctaaaccaactccaccgtataaaaaaagtggattatataaaacaccgggttcttctgaaacaacgagtgctgcagcgtgggccatctgattgcctttcccagtcacaaacgtgtcgaacgtgtatttactatttaaatgcgtttcacgtaaaaaggttggggtttcagctttggtgaggctgcgttcttcagctggtttttcagcttgaagctgctcggcttcggtaggtaacagaaaaataggggtcaattcaatctctgcgaattcgtaggccccttcaacgaccttagtggccaagttactttcccaatactctttgtgtaaaggagaaggcacttcgatcagtatttcattggctctaaaagcaagcggtttggcggttttaatccaagcattaaaaccgacgggtgttaaatcattttggaattcttcccgcaaatagttccaaagttcctgaagatcaggcatgtagcgtgtcctcctcacgtaaaataaccactttattgaaaaaaagttcaataaagaaagactatctacattctagcattctaaaaaaaagttttccacaacaagaacaaaatccacaggaatgaattaaaaagttatccacttgaacacacgaccggggataacttttagtggggactgtggaaaacagaaaacaacaaacgattatcgcacttatccacaaaaaagtgtgtgtatctgatgcttgctattaaaaggttttatcaatttgtgcacagcttgaaaatagcttgtggataacatagtaacaccctgtgattttctggataaatcagcaagtaatctgtgcgtgacaaaaatcggacgattcggtataatcagttatccacaagaaagccaatgaattattttttgtggataagaatatttattctgtttttttatggaaagtgttttaacttctatagaaatatgctattatattttagtgaatgtcgtaggtggtatttatcacccgttgtttctcagatatgaaaacaatagacacagtcaattaggaggtgccagtataatgactacaaagagaactttccaaccaaagaaacgccataaagaacgtgttcatggtttcatgaaacgtatgaatactaagaacggtcgcaaggtacttgcaagacgccgtgctaaaggcagaaaagtattatctgcataggccactgatgcttcagtggttttttttattatcctcaattaattaaatgaaatgccggagtgaattatgagaaagtcgtaccgcgtcaaaaaagaacaggatttccaaacggtttttgaagcaggtcattcagttgccaaccgcaattttgtggtttatcaattagaaaaacctggtcaaaagcattttcgggtgggcctgtccgtaggtaaaaaagtgggtaacgcagtgatgcgtaatcaggttaagcgttacattcgccagagcttgttggagttgaagccagagttaccacagactgtcgactttttagtgatcgcaagacgtggcgctaaccaactaacaatggcggaaaccaaacagaatttaatgcacgtcttaaaactagcaaagctattaaaggaagaagcagattctgcttctgaataagtgagggattacagtgagttcaaaaaatcgcaaacggctattattagtggccagtctattcttgttcatgctaatcgcagcggggtgtagtacatcaccagttgatagtagcagtactggcttctgggatcattatgttatttataacttttcccgctttattttatggttagcagacatctttggtggcagttatggttgggcaattgtggccttcaccatcatcattcgggtgattatcttgccattaacttggtggcaaagtaagagcatgctcaaacaacaagaagttgcaccagaaattcaagcacttcaaaagaaatatgcttctaaagatgctgagacacaacagaagttacgcgaagaaacgcaaaagctatatgctgaagcgggcgtcaatccagttgtgggctgtttaccactagtggttcaaatgccagtgttgattgccttgtaccaagcaatctatcgaacagctgctttaaagagtgggacgttcttatggatgcaacttgggaaagctgatccttactttattatggctatcttggctgcgatctttacatttgcaacatcgtatctaacaatgatgtcgcaacccacgaagaatgctgcgtcatccgcaatgttgtgggtgatgccaatcatgatttttgtgatggccatgaacatcgcgtctgctgtttcaatttactgggtggtaacgaacgccttttcagtgggtcaaacaatggtgattcaaaatccatttaagattcgccgcgaacgcgaagccaaggaaaaagaaaagcgtgatcgtgaaaaagcacttgctaaagcacgtaagaaagcaactaagaaacgttaatttccaaaattaaaagaccaatcataatgaattttcattatgattggtcttttttagaataggtaataggcagcaagtacaagaggaattgcgatagcgcagacgacacaaacggcaccaataagtaacccgcttttatggcggttaatcgttgtttttctcagcaagaatcgggatccaaaaaaataacagaatggtaaaaggatgaggggaacattctgagccaccccttcgacaggtggaaaggttagcattaaataatctaatagcaaataaaggagtgttgttaatataaaaagaaatagtttcaatggctaatcctccatagcgctagattaaaaaatagaaattcagatagataaattgttaaaattggttctaaaccgttttcttaattttatagtagcatcatgattggtaataatcgataactaatttcaagactaataatcattcaaaaatctttaagaataaaaaaatcgtaaccgatttggttacgattttttgctgtttaatagtctaattgtttcaaatgaaggaggaagtgctgatcatcaatcggttttagatgataaagcactagaattttacgcgttaactttggttcaatcggtgcagcatcgtcaaacatatggaagtgatcgaaaaaggctgtattgacttgttcgattaacgttaaaatgccggcactccctaaatcgaacccaagatggtcggtgtctgataattgactcgccttaatatgggttaagtattggatcagttcgggtcccattgccataattttatcgggcacttgggtcgtttttaacagtgtttttaaatctgcgattgtattagcgggtacttgttcaatcgtcatcataaacatcgcctttctagcagctatgtatctgcttacattcctaatttaacagatattatcaaaatgtctagtggatctggttgaattaatcgcgctttgcgcgaaatttcgctataataagtgcaatcgtttaaaagtggaggataaagagatgacctattcagaacaatgggatttagaaccgatttttgccggggggattgattcaccagcgttgacgcaacgattggcggatttgactgcacaaatgacgcccttattagaagcggtccagaactggacgtttgcgacagatcagccaacatttgcaacgctaacgcaaatcactgaacagttacaagcgattgaagcgggtctcaagcaaacggagagtttcgtgaatatgattcaatcaacggatgaacgcaatccgcaagttgcaccgatgatggggcggattaatgcgcttgaaaatgatgcgaatcagattgatgtcgcactcacaaaaaaattggtcgcaatgtcagacgcagattttaaaaccgttgtatcgacacctgccttacaagcgattcagtttaatctaaccgaaaaacggacgaatggtgctgaacttttggatgaagcgacggaaaaactaattaaccagttcgcgttagatggtttaactggatggagtgatcattacgactcattggttgctgaaattcaagtccccgatggtgagacgactttatcggcgggacaagcgcagaataaatttgaatctgatccagatcccaaggtacgccaacgcgtctttcaaaattggtaccagacttgggatcggtattcaccattattaacggatacgttaaatcatttggctggcttccgcctaacggattatcaagcacatggcacaacggactttttgaaaaagccattggcaacgagtcgcatgcaacccgcaacgttagaagcgatgtggtcgatcgttagtcaaaataaagcgccgcttgtcgattttctaaatcggaaggcagcgttaatgggcaaagaacagcttgcttggtatgatacctgggcaccagtggttgtaggtgattttcaaccgcagcgttattcttatgatgaagcagcggattttatcatgcagaactttaaagcgttcagtcccaagatggcttcggtggcacaaaccgcgtttgaaaagcgttggattgaagctgaagatcggccaggcaaacaaccaggtggttatatgactgatttacctgaaacggatgattttcggatttttatgacatttgatggcacccccaatggtgttgcaactttggcacatgaattagggcatgggttccatacaatgatgattaatgatttaccaagttggcgacaagactatgcgatgaacgtcgcggaaacagcttccacttttgctgaactaatcgtcagtgatgcgactgttaaagcagcgcaaagcccagcagcgaagattaatttattggatcagaaaattactaacgcaattgatatgtttatgaatattcacgcacggtttttattcgagcgacatttttatacagcgcgccaaaatggcctgcaaacaacagctgatttaaaagcactcatgctagccgctcaaaaagaagcctatgcggatgcgttgactgattatgatccgctattctgggcggacaaacagcatttcttcttcgatgacgtgccgttttataacttcccttatacgtttggctatcttttttcgatggggatttatgccaaggcacagacaatgcctgattttgaagcggactatatcgcactattacgtgatacggccaatatgtcgactgaagcattagcgcaaaaacatcttggggttgatttaacccaaccggatttctggcaagctgccgcggatagcatcgctaaagatgtacaacaattcctagctttgacggcggactatctcagataatgacatgctatttttaaattggtatatcatggtataataaacgagaatcgggcgctcacactagttggagtgaccaaattgatcggaggttttgaaatgccaacatatgaaggtagcgatattcaagcagcggtaaatgaagggttgcaagctatgcatctaacgcgtgaggaagtgtccgttgatgtattggaagccggcaaaaaagggtttctcggttttggtcgccgcttagcagttgtccggctaacgccaaatgaacaaccaagccaagttaaacaaagcgccccagccccagttcaagagctagttgaaccaacgccaacagacaatttaactagtacgccgcaaaagcggaaaagtggtgtggaaacggaagctgagttaagcgcctatttggaagccatcacggctcaaattggcacaccggtcagcattcatgtaactcacgaccatcggagtacgacttatcatttgaagaccgataaagaaggcttgttgattggtaagcatggtaagacaattaatgcgctccaatatttagcgcagacttactttgatcatcatatgaagggcaagcaaaccattatcctagaagttggtgattatcggcagcgaagagcagcgattgtcagccaccttgccgataaagcagcccgtgaagtcgttgcgaccggcaaaccagtctttttagaaccaatgccggcttttgaacgcaaaattgtgcatgggcatttagcaactaatcaccatgttcaaactcattcagaaggccaaggcgatcgccggtcaattgtggtggaattagcgcgcacattttaggtgttgtgaattgacgctctaaaaaaatcgtgtataatgaaactaattaaatatcgataaagtagtgaaagtgctttgtccaccccttacacaatgacgggaggggtggacgctaagcgctttttttatgcagctatttcggaaaggaagcatttaaaatgccaacgacagtcacagaatttgatacgattacggcgatttcaacaccacctggtgagggggcaatttcaattgtgcgtctttcaggggatgagagtttagccattattaaacgcgtttatcgcggcaaagatcttgatcaagtggcgagccataccattaattatgggcacattatcgatcctaaaaccgacgcagtagtcgatgaagtcatggtgtctgtcatgcgcgcacccaaaacgtttacccgcgaagatgtgattgagattaattgtcatggcggaattgtcgcaacgaaccgcatcttacaattattaatgagctatggtgcacgaatggccgaaccgggtgaattcacgaaacgagcctttttaaatgggcggattgatttaacccaagctgaatctgtgatggatctgattcgggctaagactgatcgggcgatgcaagttgctgttgatcaattagatgggagtttaacgcacctgattaagaatttacgccaagaaatcttagaagtattggcgcaagttgaagtcaacattgactatcccgaatatgataccgatgaaatgacgacgcggattctacttgaaaaagccgaacttgtgaaagcgcggattggtgaactacttcaaacggcacaacaaggaaaagtcttacgtgaaggcctagcaacggccattgtcggacggcccaatgttggtaaatcaagtttgttgaatcacctattacatgaagataaggcgattgtgacggatgttgccgggacgacgcgtgatgttttggaagaatatgtcaacgtccgtggggtaccgctgaagcttgttgatacggcaggaattcatgataccgaagataaggtagaaaagattggggtcgaaagaagtcgcgcagcaattaccaaggctgacctgattttattagttttaaatcaaagtgaaccactaacggttgaagatcgcgagttaatcacggccaccactgataagaaacggatcattattttaaataaaaccgatttaccgaacttgttagacttaaatgaactccaaacattggtgaatgcggatgaagtaattcaaacttcaattttaacaagcgaaggggtgaccgatttggaagcccaaatcgccaaactcttcttcggtgggattgaaaatagtcaaagtacggtcatgattactaatgcccgccaaattggtctattaaaccaagcacaacaatcattagatgaagtcatcagtggaattgcagctgggatgccagttgaccttgtgcaaattgatatgaccaactgttgggataagctcggtgagattaccggggattcagcaccagatgaattgattacggaactctttagccaattctgtttaggtaaataggtcttgaaccatattaaaggagaacaaaatatgcgagaatatgacgcagcgcactacgacgtgattgttgttggtgccggccatgcaggttctgaagcggctttagctgctgcacgaatgggccgcgaaacattactattaacgattaacttagacatggtggcttttatgccatgtaacccatcattgggtggtcctgctaaagggattgtcgtccgtgaaattgacgccttgggtggtcaaatgggccgcaatattgataaaacatacattcaaatgcggatgttgaatacaggtaaagggccagctgtccgcgcgttacgcgcccaagctgacaagcacgcttatcaccggacaatgaaacggactatcgaaacgacggagcacttaacacttcgtcaagggattgctgaatcattgatcgttgaagacggtgtctgcaaagggattgtcactaacactggtgcccgttacagcgctgatagtgtgatcttaacggctgggacagcttctcggggtaagattattatcggcgaattaacctattcatctggtccgaataattcaattccttctattaaactttctgaaagtttggaagacaacggatttgtcctcacgcgttttaaaacggggaccccaccacgcgtggacggcaccacgatcgacttttcaaagacggaagaacaaccaggggataaggaaccaaaccactttagtttcgaaacacctgatagtgcttatttgaaagaccaactttcttgttggatgacatacacgaatgatacgacgcatcaagtgattcgcgacaatctcgaccgcgccccaatgtttaccggcgtaattgaaggggtgggtccacgttattgcccttcaattgaagataaaatcgtccgcttcgcggataagcctcggcaccaaattttcttggagccagaaggccgcgaaacagaagaatattacgtcggtgatttctcaacctcaatgccagaagaaatccaacacaaaatgattcattcgattgaaggcttagaaaatgcccaaatgatgcgtcctggttatgcgattgaatatgatgtcgttgaaccatggcaactaaaaccaacccttgaaaccaaagtggttgaaaatctttatacagccggtcaaatgaacggcacttcaggatatgaagaagcggctggtcaaggcttgatggccggcatcaacgctgctctgaagcaaacgggccgcgacccattcatcttggaccgcagtgaagcttacatcggggtcttaatcgatgacttggtcacaaaggggacgaaggaaccttatcggctattaacctcacgtgcggaataccgtttgatgcttcgtcacgataatgcggatttacgcttaacagaaaagggtcatgcattaggcttaatcaatgatgatcgctttgacagctatgaagtgaaaaaagcagccgttgaagctgaattagcacgtttagcaaccattcgcttgaaaccaaccccagaaatccaagcctttttagcggctaagggtgaggcaccacttaaagatggtgttttagccagcgacttcttaaaacggccagaagtaaagtatgctgatttaatccaatttattccagcagtcgaaggcattgataaccgcgttgtggaacaagttgaaattcaaatcaaatacgcgggttacatcgataaggaaaaagctaaaattgcgaagttaaaacgaatggaagctaaaaagattccagccaatatcgattacgatgcaattgaaggccttgcaacagaaggtcgtcaaaaattacaaaaaattcaacccgaaacacttgcgcaagccagtcggattggtggggtcaacccagccgatatcgggattctaagtgtctatattcaacaaggtaagattgctaaggtcaaatagcctggttgataactagtcattagatatgttagagttaagcatatattgtcaatggtagaaagccagccgtttcacatgaaacggttggctttttagagtcatgaaagaaaagtgagggaatcaagtgataactgttagtgaaatgagcttaacgctttctgggcgtaagttatatgaagacgttaatttgaagtttacacctgggaattgttatggcgtgatcggtgccaatggtgcaggtaagtcaacttttctaaaattattagaaggtaaattacaaccatcatcaggccatatctcaatgggccctaatgaacggatgtcgagtttgaaccaagatcactacgcttttgaagaatttgaagtgttagagactgtgattcaaggtcataagaagttgtatgaagtgatgcaagctaaggatgccctatatgctaaagctgatttcactgaagaagatgggatgaaagctgctgatttagaagctgaattcgctgaaatgaatggttgggatgctgaatcagaagctgctcaattacttcaagccttagggattgatgaatctttacaccatgtgaagatgagtgaattgatggaagggcaaaagattaaggttttacttggtcaagcgctctttggcaaacctgatatcctattattagatgaaccaacgaatgggttggacagtgcctcagttgaatggttagaagatttcttagcagacttcccgaacatcgtgattgttgtttcccatgaccgttacttcttaaaccaagtctgtacaatgatgtgtgatgtggacttcggtcgcatcaagacattcgttgggaactacgacttctggttagaatcaagtaagttagccgctaagttacaatcaaacgttaacgctaaaaaagaagaacaaatcaaagaattacaagattttatcgcgcgttttagtgccaatgcttcaaaatcaaaacaagccacttctcgtaagaaacaattagaaaagattacattagaagatatccaaccctcttcacgtcaatacccattcattaagttcgatttcgaacgtgaattggggaatgatcttttacgggttgagaatgtttcaaaaacaatcgacggtgttaaagtgttagataacatcagcttttcagttaagccagacgaaaaagcagcaatcgtttcacgaaatgacgttgcgacagctgtcttaatgcaaatcttagcaggtgaagtgcagccagatactgggacagttacctggggtgtgacaagtcaacaatcatacttaccaagagatacgaactcagccttcaatgatgatcaactcatcatcttagactggttacgtcaatttgccgctaagggtgaagatgacaatactttcttacgtggtttcttaggcaagatgcttttctctggagatgaagtcacaaaagaaatcaatgtcctttctggtggcgaaaaagtgcgttgtattctatcgaagattatgttgcaaaaatcgaatactttactattagatgatccaaccaaccatttggacttggaatcaattacttcattgaatgatgctttgatcgatttcaagggtgctttagtctttacatcgcatgatcatcagtttattcaaacaattgcagatcatatcattgaagtatcagcgaacggtgttgtcgaacgtgctgaaacgaactatgatgagttcttagcacatccggaattacaaaaacaagttaaaaacctctacgtttaatagtagaaaaacgaaggcccctagtatagctaagggcctttttttattgttataagataattattatttatttacagaaaatccttgcatcacgggttgcaagttggtatactaataaagttgtcaaaagcgagctgattagtgataagcagtatcgtcaattaaataaaaagttttgaaaaacacttgttatttaattgaaaacatgataacatattatatgttgcttaaggagttataacttctaagtaataattaattaaaaatagttgttgacagacgataagttgtgtgatatacttaaaaagctgtttcaacacagtagatctttgaaaactgaacaaagtttcgacaaaccaaatgtgttcctaataataaataattgtagtatagcaaatatttttcaactattaagatttaatcagtaattttaatatttcattgagagataatgcgctttctaaatgaatacggtatagttaaggtaatgaaaagtagggggttggggacgtgctgactttatcacatttatccaaaagtttcggaacgatgctagcggtcgacgatgtttcatttacggttaagtcgggcgaaatattaggcttaattggtcaaaatggagctggaaagacaacgacctttcggatgatcttgaatttcatggcaccagatacgggaactattctctggaaaggtcgcgcgtttaccgctgcggattatgaccaacttggctatttgccagaagaacgaggattgtatccaaagatgaccgtggaacaacaaattttgtactttgcacagcttcgtgggcgcagcatcgcagacatcaaaccacagattgatgagtggttggtgcgctttggggtgaaaggtaagcggactgataaaatcaaggatctttcaaagggaaatcaacaaaaagtgcagttgattgcgactttgatccatcaaccggaactcattattcttgatgaaccctttagtggactcgatccagtgaatgcagaacttttagaagaaggtattttatggcttaaagaacaaggttcagcaatcattttttcgagtcatgatatgacgaatgttgcgcggattagtgaccggattgtgatgttgcgcgatgggcaagtggtgctcgccggtacaatcgatgaaattcggaatcagtttggccgaacgcaattattcttagaagcaccgttagcacgcgaaactttagcaaatatcaacggtgtttcacgtgtaacacagcacgggcagcggtttgaattaactttggcagacgaaacggttggtaaaacgattttcgacttagcgacacaaaatggctatatcctagagtttagtcaacaagcaccaacgctcgatgaaatctttagaatgaaagtggaggaaggccatgtttaagtttaaggtgatttttaaacaagtatttctaaagaatattaaaagcccagcgtatctaatcatgattttgatgccaattgtgatgctcgggattacgtttggtgtgagtcgcttgatggatcatagcaaagaacccgttagaattgctgttttggcgccgcaaccagcagaacagagtgaattacagcagttaaaaggtaaaacatatcaaatcgatcagcagattacgactcgggaacaagccaccaaagcgctccagaaagagcgaattgatggctatttgttgttgagtgaggaaaaaggacagacaatcagtcgctactatgaacgaaaagatagtccatcatttgatgcgagtgtcttagagaatcagttaaatcagattcatttagtagctttggcgcaacaagcaggcgttgcacctgaacagatccagaaattgatgacgccaactgtcattgcaccagtgacggttaattaccagaatggtcatgaaaagatttcccaggaaaacactaaagaagtgggccaaattatttcaattggaattacggtcttaatgttcatctttatcgtgaattatgctggaatgattgcccaagaaattgcgactgaaaaagggtcgcgaatcatggaaatcattctatcaagtgtttcgattgaaattcaatttttcgcgaagattgccgcgatattagccctattactcacccaaattactgtctatattttagttgggattgtcgggtttcagtttttgaaacagcaactaccgttagcagagttattgccgattattcgtcgtgctttggttgcgccagcaatgtggtatgcaggagtctttttaattattggggtattactctacaccgtattagctgcaatgttaggcgctgttgtgtctcgaatggatcaggtacaacaagccatttcgccattgattttactgggcacattaagttatttgggtggctttgtactggcatcacagaccgatattccattattgcgggcggtgagctatgtgccattgttttcacagattatgttacctgtgcggctggcaaacggtgatgttggcgcgttcggggctagcatgggactcttcatagccatggcgacactaattggactgacttatttagcattaattatctatcgcatgaatattctagtttattcggataaaggtgtttttaaagcattaattgccacctatcagcaactcaaagaatcgcgccagtagaagatttttacaactaattaaagcggattgatggtatgatagagccatgtgattttagtagcaaggagagcgattgaacgatgcaaaaacgatgggtaaaattcggattggcactcttaggggtgacactggtattggcaggctgtcaaagtaagccagcggacaaagaaacgttggtcaaaaagccctatgaaaaaagtgattactatctcggaacgatttgtacattgcgaatctataataaagacaaggaagccgtgctagataaggcttttgcgcggattaaaaagtccgaaaatcaagcaacgttaaccaaatcaggttccgaattggataagattaatgataacgccggtgttaaacctgtacaggttagcaaagatatgtggccactaatggaaaaagcgttacattatagtcaagaatcggatggcgcgtttgatatggccattggtgcgatcacagatttatggcaaattgggttaccaggcgcgcgggtgccagcacaagcagaaattgaccaagcgttaccattagtcgattatcatgacgttgttttgaataaggccaaacgtacagtttaccttaagaaaaaaggcatgcgacttgattttggcgggattgctaaggggtacattgccgatcaagttaaacaagtttttaagaaaaatggtgtgacatcagccgttattgatttaggtgggaatgtgattgttatggggcattcaccattagggaagaacaaaccatggacggtcggcattcaagatccgaaaaaggcgcgtggagaatcagtcggtacgattaaaggccgtgatatttcggttgttacggcagggatttatgaacattatctaaaaaaagacgggcatacttacatttatctctttgatcgccatactggctacccatatgaaaataacctagcgagtgtcacaattatctcgcctaaatcagtagatggagatgccctttcaaatgctgtctttaataaggggattgtcgaaggcatgcagctcatcaacaacaaaccgaagaatatccaagccatcatgatcacaaaagataataaaatctatctatcaaacggtttgaagaagacgtttaaacttaaccaagattcaaattatcaagttgaaaaacaattaccaacgaaatagccgctaaattgcggcttttttgcaattatgggggtcaaagcattaacggaaaaagtggcaaaatgttaaaattgggaaagaatctgcttttgaggaggacaatgatgacaaacgtgcgaatgcaagatgatttttatacggcagtgaatcaagaatggttaaaaacggctgaaattccagcggataaaccagcaacaggcggctttgtcgccttggttgatgagattgatcagcaattaatggctgattttgctaagatgtcgaccgcaaagaacgcattgttacaacattttctagattattacgaactagctgcggactttcaaacgcgggatgcactcggtatgaaaccgatcctaccaatggtagcccgggtgcaatctctcgatagtttagcaacttacaatcgtgggttagctgattgggtactttccgggttaccaacaccatttggcttatctgtcgatgctgacatgaaagacacagcccatcacgcgttgtatgcggaagctagcgacttaattttgccagataagacctattatgaagctgacaatcccaatgctgaccatttattggccgtctttacggatatgatggttcagctcttgcagaaaattgggattgcgcccgttgatgcaacgaagacggttaaattagcgttggcatttgatcggtcactggcaccttatgtgaagagtgccgaagaagcagcggattacacgaaactctataatccacagcctttgagtgattttatgcaacaacaaacgacgcttgattttccacgtttatttagcaaggtgctacctgttcaaccggaaaaaattatcgtgacggaaccgaagtattttgcgcaactgagtcagcttgtgacagacgccaatttcgaaacgttcaaagcgtggctgttagtcatgacagttcgtagttggagcggttatctgaatgaagaggcacgccaaattagttcgctctatagtcgtgcgttatctggtagcaaggaagctcgtccacaacaaaagagtgcttactaccttgccttagggatgttcaatcaagttgttggcgattattacggtcggcaatacttcggtgaagcagccaaggccgacgtccaaaagatggtccaaaaaatgattggtgtttatcaaaaacgccttgaaaaaaatgactggctaaccgaaaaaacacgccaacaagcgattgtaaaactcaaccaccttgggattcatgtcggttacccggatcagattgcccctatttttgcgaagttggtcacagtacctaaagcagaagatgggacattatttgaaaatacagctgactttattcgaacgattgaaacggaaaattttgcgaaacttactcaaccggtggatcgtaataagtgggaaatgggcgctgccacagttaatgcctattattcaccttcgaagaatatcattgtctttcccgcggctattttgcaagcacctttttacagtttagaacaaagtagcagtgctaactacggtgggattggtgcagtgattgcacatgaaatctcacatgcttttgataataacggtgcgcaattcgacgagtatggcaacatgcataattggtggcaagaatcagatttagctcacttcaagacactttcggaagaaatgattgcagaatttgatggcctagaatatgcaggcgcaacagttaacgggaaattaactgtctcggaaaacattgccgatgcgggtggcttgagttgtgcccttgaagcagccaaagaagaacctgatgttgatttggcagccttctttgtcaattgggcaacgatttggcggatgaaagctacaaagcaatatcaacaattattgttaaatattgatgttcatgcaccaaacgcgttgcgggccaatattcaggtccaaaacttggcagccttttacgagacatttaatgtaacgaaagctgatcagatgtacttagcacccgctaaacgggttgcaatttggtaaattaaaaaggtgcgccacaattgtgacgcacctattttagtagtgatgggggataaagaaatgtcagaaaaaaaacgcatgattaatggtcaaatttatcgggcgaacgattcagaattgcgagccgatatgaaacacgcgcgcgtacttactcggttgtttaatcaaaccactgaagaacaacaagattaccgacgcgaattaaccaagtctttatttgcgaaaagtggctcagatttatatattgagccaccatttagaactgattatggttgccaaacacgcattggtgagcatgtgtatatgaattacgattgcatcattattgatgtagcaccagtgacgattgggaaccacgttttctttggacctcgtgtagggctctacacagctggtcacccaacgacggcacaagaacgccgggatgatctggaatatggtaagccaatcaccatcggggatgatgtgtggattggtggcaatacggttgttaatccaggcgtgacaattgggaacaatgtggtgattggttctggatcagttgtgactaaagacattcctgataacgtgattgcagttggtaatccatgtcgggtactccggccgattgatgaggcagaagaggcctactgggcgcagcaaaaagcaagttattttgaagcccttgctaatgaataagtttaccgagtagtgttaaatggagtagtcatcactaacaaagcactaagctaaatatcagcaaactaccgagaaaaagccgctagtactctataaaaagggttctagcggcttttttaaatgtttggtggatcaaactggcagcaaatactattcagaatgggtcaaaccgtaataagggttaattacgattggttttcatcagtactgcggtgccatggcttttgtaatgcttggacggcttgagcgatatctgtggcgtgggtgattgctgagataacggcaactccatccacggtagtctttgcgacttgagcaacgttttcttggttgataccaccaatcgcaacaaccggtagttcactttgctgcgttaagaaacgcaagcgattagtgccaagtgctggtttagcatcttctttggaattggttggaaaaattggaccaatgccaatgtaatcaagtatcggttgattatgactttggtgaagttcttgttcagtgtggcaagatagaccagttattaagccgtgtgctttggccgtttcaattttatgccacgggtgatcgctttggccgacatgaataccatctgcattgatttgaagtgctaaatcgagattgttatcgataataaatgggacttgataatggcggcaaagggcttgagccgctgtcgcatactttaaaatcgcatcggaatcttgcagactaccagcacctttttcacggaattggaaacaggtaatgcctgcttgtagtgcttgttcgagaatgtttagaaaatcatccataccggtattttgggtacccgctaccaaataagtttggaacatttcccgggaaatgttagtcatgatgaacctcctgataagtccagtgattggttggtccgtggccgtgaccaacagcaatcggattagcaattgcggcttggataaaggctttgctaatatgaattgctgctttcaaaggggtgcccttagctagctcggcggttaaacaagctgaaaacgtatctccagtgccatgtgttcgtttagtagcaattcgtggtgtagttaaccattcatcttgtccatcagcgtagaggacgtaatcggcggcttgtgattgatagtctaaatggcccctttgataatgatattcttggcgcccatttgttggagttggtgggccgcttgtttgaaatcagctgttgtctttatgcggctgcccgtgagaacttcggtttcgggtaagttgggtgtcagcactgtggctagcggcaataattcagtacgtagggtatcgatggcatcgtcggcaagtagctgtgcaccgcccttggcaatcattacaggatcaagggtgagcggcccccaatcataatggcgtagattttcagcgaccgttgcaacatgttcagcatctgccaacattcccgttttgcaggcacgaattttaaagtcagtagccaatgaagcgaattgttgattgattagtgatagtggtagtggcagactgccttgaactctgtgttctggtttgatgttgctaacattaatgatatcgggaatttcttgggtggtgcgaaatcacttgcgaatggttcagctgtgattggtaagacagggatgtatcaagctggtttcttcccagtcatgatgttcggcttacctgctggggcttacgcaatctacaaaaatgctcgtccagaacgccgtaaagcaacagcttcattgatgttagctgctggttttgcgtcattctttacaggggtgacagaaccacttgaattctcattcatgtttgttgcatggccactttatgtattgcatgcagctttcacagggatttcattggctgttgctgctttcttccactggacagccggtttcgcatttagtgctggattagtcgattatgttttaagtttgaaaaacccagttgctaaccaaccgttgatgttattggttgaagggttggtcatggcagttatttactactttgggttcaactttgccatcaagaagtttaacttgatgacaccaggtcgtgaagcagaagatgctgttgatgaagatactgctggcgttgaaacagacgctactgatgataaattcatggttcaagcaaaacggatctacgctgcaatcggtggcaaagacaatatcaaagtgattgacaactgtacaacacgtcttcgattacaattagaagacactgccaatgttaaccaatcagcgattaaagctgttggtactgctgggattaacgttttagataaaacaaacattcaaattattattgggacagaagtccaatttgttgctgatgctttaaaagaactttataaccacaatacgccaatcgcaacaagtacaccagaacaagctgccgcaccagttgaagcacctgttgatagcgatattaactcaggtgaaacagatgttttctatgcagttgctaatggtgaattgatcgatattgaaaatgttgatgatccaacttttgctcaaaaaatgctcggtgatggctacgctgtcattccaacagacggcaaaattgttgtaccagttgatgggactgttatgactgtgttcccaacgaaacatgcaatcgggattaaaacaacgaacggtttagaagtcttagtgcacatgggaattgatacggttgaattaaacggcgcaccttttgcagtcgctgttgaagaaggccaaacaatcaaacatggcgacttattagcaacggttgatttgaatcaaattactgctgctggtaagaagacggcaatgatggtgatcattaccaacatgcccgctgttgattacattaagtttaacgcaatgagtaccacagttgctgcagacgcagttgccttaaaagcaacaacgaaataatgaataaataaaaagccccgcaaactgaagtttgcggggcttttttgtgttatttagttaaataatcctttgaagaaattagccatgctatcaaagagtttttgaatgaagttccgattgctttgggtgttgagcttattgaagatgtttttcgcaccactttggatattattcattaacttaccggcttgattcttgaaatcatccgaatttaaagcaccggaatcttggattttaacgagaacattaatgatttgttgtttttgattattgttgatgatgttggtgaggttgttttgttcgagttgattattgacgatggtagtaatttggttaacagtcagattattgcccttacttgccatgtcttttttggcacctgtgacggcattattcaattgggaatctgaataaccatcggtgcctttattagcctgtgtgatatcgctgagggtgctcatttcgtcttgagcagcagttacttgcgcttggttgagtgaatcgccattttcagcgaaagcggcgtaaacgccagctaaggcgccagagccatcgattggaatggcggaagtcacgtaaattgtcgcattcgtgacgccggcggttaaggccgcatttttatattggttggctgtaattgtggtgatgttgttatggccattaaaatcgataattttaacattgatgccggtattgctgtcatttttttgaattaaagcacttgagtagacacttgagttggcgttaaatgtttgttgattttgatcaagatattttacaagtgtggaaccggtcactgttagttcactgacatctgtgacattcgcggcattttccagtgtcttgagggtatcagctttttgggtgctagaaaggctagtcccaagagtggcaacgggtttgtcccacgatgtggtgctgtcggcaaaggccggttgtgcgctcagaccgataatagcagtaaatgcaatggggatgaggaacttcaatttattaaacataagcaataatcctttctcaaagcgaatgatacctttagtatagccaattcaagccgtaaagtatccgattttaactatttttaggaattaaagatgattttaaggcttttttaaggttgctgagtggggtgaatgctactaatgacccgtgtatgggttagtttctcgtagaataattgtggtcgtttagtcacccaacttaataagaagttaccggtgaataacagtggtggtaagagtgagagaccgataataaagagatagacgtcaaaatgttgttggccactagcaacagcggcatccagggtgacgcgccagagttgaaagctgggaatgacgatgaaaaataggagtagctggcgccagaagatcgcccaacggtgatgatggtcagcgacaatctgtagttgcaggagagattgaccaggtgttttgccacgccaaaaaacggggagcattaagaagtaagcaccagttgccaggcagtactgaagcatttctgaatgaatggtgggtagttttagtaatcgccagataacagcaattgcaaatgtaatgatgcctaacgcacagtaatcaacggcaagtgccaataagcgccggaagtagcccactttttgaccgcgcgcataggctgcttgatccaaactttcacgagtgggtaagaaaaaggtgaccaagggctggagataaaatccaagcagtccgccagagatgttgatcaataagtcatcaacatcaaataaccgataagggcgaggataaataccatacagtccggaaagttgcgtgagttcaaagaatagggataacgtaaaactaagtaataaggtctgtttgaaagacgttttaaagaagtaacgtaaataaatgccaaatggaacggttaaaaagatgttaaacaacggctgaatggttgccgcttgtttaagtgttgcgaggtatgaactcggttcggtccaaacgaaatgggttgagttgataaactcccggacaaacgtaaagggaactaagttatagcgaggggtggttaaatgagcgaccaccgagcgtgggggaggggaagaataattaagcagtaagcggctaccaagtagaacatgaagctgtagagaattacactacgcaggatggttagcgaaccataacgatgatagtggtaaactaacagtggaacggttaagatgattgcgacgaatgaaaaggcaattgccgcagtaatgatattgctgacgtaaaccatgatgagctcctttggtgttagatgtggttatattgtattttttaatgaacgcctgtcaaaacagggatcattgttcgttatttacgttcgtattttatcggttatatgtatcgttaagattttactgaataaaggctgattagagattttaaagttcgtcttttatattgattttgagataatttgttgctacaatagtttttgtgagttttagggtttaaatagcggatctgaagacggattcgaatagaggagtatgtttatatgacatctgtagtagttgttggaacacagtggggcgatgaaggtaaaggcaagattaccgactttttaggtcaaaatgctgatgctatcgcgcgttatcaaggtggcgacaatgcaggtcataccattcagttgggtgacacaacttaccatttacaattaattccatctgggatttttaacagtgacaaactcagcgtgattggcaacggggtcgttgtaaatccgaagaccctcgtttctgaattgaaatatttaacggatcaagggatcaacgtgagtcaattaagagtatcagatcgggcacacgttatcttgccataccattctaaattggatggcttacaagaagcagccaagggtgatcaaaagattgggacgactaatcgtgggattggcccagcttatatggataaagccgctcggagtgggattcggattgccgatttattggacaaggaactctttgcaactaaattaaaacaaaacttagacgaaaaaaatgcgctctttactaaaatctacggtgctgaaccacttgaatatgagacaatgtttgcagaatattatcaatatggtcaagaaattaaacaatatgtttgtgatacttcagttgttttgaatgatgttttggatcaaaaggggaatgtcttatttgaaggcgcacaaggcatcctcttggatatcgaccaaggtacgtatccatttgtgacatcatcaaaccctgccggcggcgtttcaacaggttcaggagttggtgcttcacggattgacgaagtggttggggtggctaaggcttatacctcacgcgttggtgatggcccattcccaactcagttagatgatgaaactggcgacttcattcgtgaagccggtcatgaatatggtactgttactggtcgcccaagacgcgttggctggttcgactcagttgtgcttcggcattcaaaacgagtggcgggtgtgacccaattatcattaaactgtgtggatgtcctaactgggattaaaacattgaagatctgtgtcgcttacgaattagatggcgaacaaatcgatcgttatccagcaagtctccgcgaattagaacgttgcacaccgatttatgaagaattacctggttgggatgaagatatcacgggtgctaagacgctagaagacttgccagctaatgcgcggcactatgttgaacgaattcaagaattagttgatttaccattagcaacatttgctgttggtccagatcgtgaacaaacaaatgtcttatctgctatctggtaggtattgctgaaaaagagtacaaaaaaagagaatgcaaagttcgttttctaaacgtgtcgttaaacacgccaacaaactttcattctcatgggtttggcaccagtcagtattatacacacattaccactaaaaagatagtgggaaaattagttggtttagaggagtcgttatggaaagagtaagtcgcttcttcgggattgaagaacaacattcaacagtgcaacgggaaatcctagcaggattcaccacatttatttcaatggtttatattttattcgttaacccgagcgttttaggtgattcagggatggataaaggggctgtttttgcagccacagcattagcaagtgcgatcgggtgtttcttgatggggttatatgctaaatacccaattgcaaccgcaccagctttagggattaatgcctttttcagttattcagtggttatcgggatgggtgtgtcatggcagacggccttagcgggtgtatttgtggcttcattaatcttcatgttggttactgtctttaagctacgggaaatcattattgatgccattccgcggaatatgaaactagcgatttcagctgggatcgggatgtttgtggctttcatcggtttacacggtggtggcttgattgttgcgaacaaatcaaccattgttggtttgggggacttctcgcaagggacgacttggttaactgttttcggcttaatcattaccgttattttaatggtccgtaaagtaccaggagcaatctttatcgggatgcttctaacctcaattgtgggagccatcagtggcctaattaagttgccaacacactttgttgcagctgcgccaagtttgaaacccactttcttagctggtttaaatcacattggcgatatcaacaccgttcaaatgtgggtcgttgtactcactttcttattagtgaccttctttgataccgccgggacattggtcggtttagctgaacaagccggcttcatgaaagataacaagatgccccgcgttgggaaagctttggtatcagattcaacggccatgttagctgggtcattactcggaacatcaccagttggggcctttgtcgaatcgtccgctgggattgctgttggtggtcgaactggtttaacggccgttgtgacgggtgtgttattcgtcttcagtttattcttctcaccattattgacggttgtcacgtcacaagtgacggcccccgcattagtgattgtcggtgttttaatggctcaatcattgaagaaaattgactgggaaaaattagaaattgcaattcctgccttcttaatcgttctaggcatgccactgacttacagtatttctgacgggattgcattgggctttatcgtctatccaatcacaatgattacagctggtcgtcgcaaagaaattcatccaattatgtatgttttattctttgttttcgtggtctttatgtacatcttaaacgtaaaataaacaacaaacgcacagccgaaagtttcggttgtgcgtttttatgtgttgctgttattaattgcgaatcacaaggatttagagccggtaaatataaaatagtgtgttacaatagtcgtaaatactagtgaagggcttaaactgttatgtaaaaaaagacaagaaaccgattaattaatggcttattagccattctgttagtggttggattagtgttggtcttcatcaatccaatccgcaaccaactggttaaaatgatggcgcatcgtcagatggacgtcacagctgctcaaattaagaaaaaccaacataaaaaagcgagctttgattttgataaggttgattcactcgatacaaaacagattgtgaatgccgctattaaaggcgatgtgattgtcttaggaaaagttgcaattccaagtgtcaagatggccttgccagtcatgaaaggcgtctcagaggacacaatggctcaaggtggaggcacaatgaaacctgatcagcaaatgggtgcagttaacaattatgctttagcagggcattctttccaaaacatctttctgccacttgaaaatgtgcgcgtcagcgataaggtctacttaacggatatggaaaaagtctacacgtacaaagttgattacaaagcttcaatcagtccatacgacgtaaaagtcatcgatgatgtaccaggtcgtaaaatggtgacactgattacctgtgataaaacggtccgcagatggtgtattcaaggtgaactcgtgaagacccaaaaggcaacaaagaaaatgttagctgttttcgggaattaacccgggaaataaaagactgccagtgagttgaaatgctttaatagcagggatgcaacagatttgttgcttgtttttgtgggggttaattcgttaaattaggtttatagcggaggtggcaaaatgtcagttgggaatgctttaaaggaagctaggatgaatgttggggtgacgcaggaacaagttgcacagaatttgtttgttacacgtcaaacggtttctagatgggagcaagataaaacattaccaaacgttcatgttttaaaaacacttagtgtgctttatggtattccaattgatttcatgtctggcattattcattattgggcttgtgctttatccagtcgctaagaagatatcaggaatggttgttagctttggtaaacaatatgttaaatataatcaaaaggctctatacgcataaacataaaaacgtcatctattggatgacgtttttatttgaaaatcattggaatgaggccacctactaagagtggttggagataaatttgaagaaactaacgcgcctaaattattcaatgaattatcagcggatgaacaagtggtactcgttaattgggtgctaacaaccttgaaaccaattaaaacttttagcagtcagcggtcatcatacgagattaaacatatttttgaacgtacaccacttggcttttatgtattaaatggtgcaatgaaaggcgcgatgttaatcgctggttatcagattaagaacgaaaaagaaataaattggacgtttaatatatccgaacgtagcatttcgcgggcctatcaacttggataagaatttccgatttagggaattttatgtaaaaaaaagagatgtgcgttgagcgtgctatatgaacgcttggccccctaatatatagggggttggttaataacctgataaaacctaggttctaagtaaaggagtggttagcaccaatgattaattttactcccaaattgcaagaacagattagccacacgataaatcctattaaatcagtattttcattaatattcatattttatggacttaacttaaccggcggaagcagcggagaaaagctctttgggtgtttgatagccagtttgccggcgcggtaaattgtttagctttgactcaactgcttggatatcatgaggacccaaaatatccatggataaacccttgggtacatcgcggcggatcattcaactacggtaaaaatcgctgcgttgaaatagtgttcttttgcttgccctagagtatactctagggactattataaacaaaaagaagccataaacaaggatcatgctacttaacggcatagcatacatgactgattaaattaaccctcattagggaataggagcataacatcatgacaaaaaacgtattagttaccggcggcaacggttatctgggtctgcacattatcttacaacttttaaatcaaggttatcacgtccgtgccaccttacgccaactcgacaaacaaaccaccgtccgcaccgccctaaaagaaaatcaggcgcaacaccgcgaaaatttaagttttgtcgccgctgatctcactcaagatgctggctgggcgacagccatgcagaacatcgactacgtgctaagtgtagcatcacccgttttttccaatgacccgaacagcgacacaactgccaccgagggtattttacgcattttaaaggccgcccaacaggcccacgtcaagcgtgttgtcatgaccgccaactttggcgccatcggcttcagtaatcacgaccaaacgagcatcaccactgaagccgattggactgatcctaacgaaaaaggcttatcggcctatgaaaaattcaaactgatcgccgaacaggctgcctggcagtttattgaacaaagtcacggcagtttagaactgactacgatcaatccggtggcgatcatgggcccagcattagacgcccacgtttctggcagcttcgatctattgaaaaatttacttaacggtcgtcccaaaatgattcccaatatcccactcaatctgatcgatgtgcgcgatgttgctgacttacacattcgtgcgctgaccgcacctcacgctggcgggcaacgttttctggctagtgctgctggtcagatatcactaccagagatagcagcactgattcgccaaaaacgaccgcaaattgcccaaaacattcccactaaaacgatgccgaacttgcttttaagcagcgctgctttgttcaaccagaccgcccgcgaaggcaatttattagtgcacgtcaatcgtcagttgagtacccaaaaagcgcaagatatcctaaaatggcagccacattttgataatacgaccatcgtattagatagcattgacacgttaattcaatatggactactgccttaaattataaatttatttttatcacccccttgacaaacacttaaaatcgcgttaaattatagaaacattataaatcaatgagaaaattaaacgctgtgataagaaaagtataattgtattcaccagttaagcgagcgtcgtttggtgcaaggacgtcaaggtgcgacaattagaaaatcatctttgagcgttcattgggggctcccattatcgagctagggtatttcgtaccaattggtgcttgtacccgaagaggctgttttcgtgagaaaatggcaaatcaaggtggtaacacgtttattaacgtccttatctgaaagtaatttttcaggtttgggcgttttttgtttatcgtgatcattcccgcgcaggatgatcgccgccattactaaagtcgacttagcaatggcaacactcatgatttaaacgtggggcaacagacgcttagtctttgaaccacatttccacaacctacaaaatttaaggagtgctgcttatgttagaggaacgtaaactcactaaacgcgattatttcgtggttagttcaatgctttttggtctattctttggtgctggtaacttgatttttccattacatttaggccagctagcgggacagaattgggtgcctgccgcgcttggcttcttagtcactggtgtgttattgccattattatccgttttagcaatcagtatcactcgttccgaaggtgtctatgatgttgggcggcctttaggtcccgtattcgcgctcttattcatgatcttgatccacggcaccatcggcccactttttggtacaccacggacagccaccgtttcctacacggttggcttagcgccactagtaccaaagaatttccaaacagttggtttattagttttctccgctgttttcttcggcttagccctctttttctcattagaggaaaataaaatcgtcaacaatatcggtaagttattaaatccagttttcttagtcttattagctggcgttttcttcttagcttttagttcaccaatgggccacgccggtgttcaacacgccaccgctgcttatacatcaggctctttcgtcaatggtttcttgcaaggttataacacgatggacgccttagctggcttagccttcggggtcaccgtagttaccgccgttcgcaccttaggcaaaaaacgcgctaacagtgtcgcgctggtcactgcccgtgccggcgtcttcgcaatggcaatgatcgccgtcatctacgttggtttgatcttcgttggcgcgatgtccttaggtaaactcaaagtttccgctaatggcggcatcgcttttgaccaaattgtcaatcattatatgggcgtcgctggtcaggccatcttagccactttgatcaccgtcacttgcttaaccacggcgatcggtttagttgcggcttttgcccaagactttcataaacattttcccaaagttagctaccgcacttggttagttctaactactctggcatcattcttgaccgctaatatcggtttaaatcaaatcatcgcttggtcaacgccaatgttgatgttcttatacccactatcaatggtcttgattttattgtcagtcgcttcaccactgttccacaaagacccagtcgtgtataaattcgttgttctctttaccgttgttcctgcttttttcgacatggtaactgcttttccagcggtcgtcagccaaagtagcttcggtaaagcgatgactggcttcgaacaggcatacttgccattcgccaactacggcttagcttggttagtccctgccttagtcggtaccgttttaggggttgccgtccacgtcttcaaacgtgttagcgcccgcaacaccgtttcacaaactaaataggtaagtcaaaaaaacgttcacttgcggtgaacgttttttattgccttgaatttatactttaagtgcaacaaaagagactcatgatatgaatccctgtaaaatggtgtttgcgaagacaaccatcgaagggagcacataatcatgagcccatacaaacatcttaccatgagtgaacgcgaaacgatattcctgatgcataataatcaggcttcactgacttcaattgcccaaacaattggtcgagcaacggcgacagttagccgtgagttatcgcgaaaatagatcggcatattcaccttctgttgctcaagagcgctacgaagctcaaaaatctcattgtggacgccggtcgctactttctgatcaccaattgcttcaattaatccggcatttattcttggatctacaatggtcaccagaagaaattgccgcacgcttaaaattagagacctcatcatttcagatcagctacaccacgatttatcgtggcatctactccggtttatttgatcagaagctttcatcacgaggtgccagaggggtgatcagaaagcttagacatcatggtaaatcgcgccataaaaaaggttatgaggaacgtcgcgggaagattcctatatcgcatacactccaagaacgacctgagtctgccaataagcggactcagattggccactgggagctggatactgtagctggcaaaactggcagatcttgtgtggtcacaatggttgaccgttgttcaagatacttaataatgcacaaagcagctaagaaaaactcagccagtgtgaccactactattcgaagactactaaaagatctgccaccagaacacttgggtacgattacgcccgaccgtggcaaggaattcgctaaacatcatcaactaactgaagaatttgggattgatatttagaggtgatatgatggtcaaaattattattacggatcaacagcaaagcaaagaatatcagttaccaagttatgggagcttaactgttacaactcaaaataataaggtggtgttcattgaacgaacagacaagactaaattagtttaatacctgattggaaaaccaaagggatgcgttactgctagtacatggcaatagtgcatccctttttaatatgttggaggtgtcagagtgtttctttttgatattgatgaggataagagcagacagcaagcagatagattattaaagcgatattggcgagtgaaacatattgcaggtagtgccagtcatttaaagagtcctatttgtgatcatgcgccaaagtcttttagcagtgataatacaaccgagaaacgggcggttaaaacactcgaggcacggcagaccctagaatacatagacgtggctttaagtaagttaacggtaattaacagggaattgctaaagatgcagtatttaagtgctggtaaattaaccatggcttatatctgcggtgaactaggtataacagcatcatcattcaagaagcataagaagcaggctttgctagagtttgccgagtcctaccctagtgaaggcttattaatattcaagaagcattgataacggggatgcagtcctgatttaggatgccatcaaaattgaattaatacttaaggagtgaagcagtatgatcattgaccgaataaaccaacaagcaagtatcaaaaacgccagaaagctgttaaagagctatggcacgattagacggctagccacggtaaatactagtcatcccttacatgagcaggctaagtgtgatttaaagtgtattcaagcggttgtaggaggaatggaggatacgcaagcatccattattaatatgtgttacttagacggtagtcataaaacaaggcaatatatagcggatacgatggggtatagcaggtctagttataatcggtttaagaatagggcgttattagcttttgccgaaagctataataatcaagagttgcttgtttataagtaggttgcgcaaaatttcgcaggctagtttatggattagtaattgaataggacaagccattattggtttatccaatgtaaacctacgtgaattagcttttgttggacataaaacctaacaaaacctaacattaatttatttagagattttagaggccctaaagaaggagtcaccgaattgatgactccttaaagatgagttagtatattacaacagcatctaatgcactgatatggtgcgtcagatacttagccaattatagaaacagtacggccgaaaattcggccctaattaactttagataccgttgattttaacgagatgttgcccaatccatctttggtttcggctaattgcatggaagcaatctgaggtaccgaaacggtagtttagaaaaaggaggccctaaaatagggcggtttgtcgaaccgtgaaataacctgccataacagatcgttctattaggtcaaaataaaatgagtacagcggaaaattccgtgctactcaattagatataaattggctcaagcttgagcagatgtgttttgatatagaaacatatggagtaacgaaacgttacccctagatattatctaggtcgaaaaatacaaccaagctaaacttgggcccgtttgaaacgtctgtccaaaactggaggcacccccttatctaatgaatacagtcgcgatttacgacggaaaccataaatttaataaaaatgaatgctaatggttgctagtatgtttttaacagtctatgtttaacttaaatcgttggctaatgaagttagtccaaattaaaaaacggccactaatctgaccgcctgcagtaagttatgtatatgccccgtgcgtgatttttgttgaatacgtgaatacggttttgaatacggtttgtcgtattcactgtgaatactaatctgctaagaagaaataaaaaagccgtcatatcaatgcctaagcacctctataacgacttatcatgtatacttgatgggtggtcaggggatcgaaccctggacccacggattaagagtccgttgctctgccagctgagctaaccacccatatgatgtctcgccttacgacttaaatatcatagcatattaaacaaacttttgtaaacagttatttgtattttttttgaataaagttactgagcgcgtaagaattaatcgttatagggattaacaatgccgttaatccagttggtaggaattgacctaattttgaattgccttctgaaaatgagtataatagaaggcaaagcatccacattcaaggaggatccgcacatggctaaaaaaatactagtcgttgatgatgaaaaaccgatctctgacattgttaaatttaatctaaccaaagagggttacgaagtctacacggcttatgatggtgaagaagccttacaacaagttgaagaggctgtcccagatttaattctattagatctgatgttaccgaagattgatgggctagaagtagcccgccaagtgcgtaaatcgcatgatatgccaattattatggtgacggctaaagattctgaaatcgataaagtgattggcctcgaactcggtgccgatgattatgtgacgaaaccattctcaaatcgagaattagtggcgcgagttaaggctaacctacgccggcaaggtacaacgagtcaatcagataaagaagcgaatgaagaaaatcacgagattaacatcggggatttaacgatccatcctgatgcttatattgtgtcaaaacggggcgacaagattgaattaacgcatcgtgaatttgaattgttacattatttagccaagcatatcggccaagtgatgacccgtgaacacttgttacaaacggtttggggatatgattacttcggtgatgtccggacagtcgatgtgacggtccgccgtttacgtgaaaaaattgaagacaaccccagccacccagaatggttagtgacacgccggggtgttggttactacttaagaaatcctgagcaggagtaaatttgccgcatgaataagaaaattcggttgctacaatcgattcattttaaaattgccattgtgttcgtattgttgctgctggtaacgttggaagttatcggcgcttcttttgtgaagcaactggaatatcagaatgtgcgtgattttaagcaatccttacaagtgacatcctatattcaaaaccaacttagtaatgagttactgaataatagtggtaatgcgaacaagaatattaaagagattattggcgatatgggcaattctgccgaaattcaagttgtcgataataagggcaccattcgaggtgtcacgaacttgaataatcaaagtaccgttggtcaaaagacgcgtaacccacgggtgaaacaggttatttactctgggcataccgaacaagaagtggcatacaatgagagtctagggagctattatacagcgatccaaccgttgacgaacccaagtggggatagtaataccgttgtgggcgccgtttatattcgggctagtatggaagatgtttacaaggggatttcgtcgattaccgtcattttcttaacctcgtctttagtcgctggtttattagggatggcattatcgattgttatttcccgggcaattacccgaccaattgatgaaatgaagaaacaagcgattcaaatggcgcgtggggattactctgggcaagttaagatttatggtcaagatgaactggggcaactcgcgattgcggtcaataacttatcagtccgggttgaagaggcgcaagaagcgtcagagtcggaacgacggcgacttgatagtgtgctcagtcatatgactgatggggtcattgcgactgatcgacgaggcaatatcacgattatcaatgaaactggccaagattttttaaatgtgacacgcgatgagttactgggccagtcattgcttaaagttttacgaatcagtgatgaatattctttgcgcgatctattagaaacgcaacaggaaatggtcttggatttctcagaacaacaagatcacgacttaatcttgcatgttgatttttcattaattcaaaaagaaaccggctatatcaccggtttagtttgtgtgctccacgacgtcaccgaacaacaaaagaatgaacaagaacagcgcgaattcgtttcgaatgtgtctcacgaattgcggacgccattaacaagcgtgcggagctatattgaagcgctgaatgatggcgcatggcaagatccagagctagcgcccaatttcttaaaggtgacccaagaagaaactgatcggatgattcgaatgatcaacgatctattgagtttgtcacgaatggatcaaggaacggcaaagatgaatctcgaatatgttaatttaaacgagttctttgggtatgcactggatcggtttgatatgatgatcaagcgggatcaagagcacaaagatgatttgcctaaactgacaaccagcacgggcaaattgccaacagatgatccgaataagaagtacagtattacacgagacttcactaagcgggatttatgggttgaaattgataccgataaatttatgcaggtgatcgataatatcatgaataatgcgattaaatattcaccagatggtggcgtgattacgtgtcgcttattggaaacacatcgtcacgtgattttaagcatctctgatcaaggattagggattccacggaaagaccttggtaagatctttgatcgcttctaccgggttgataaggcccgttctcgtaaacaaggcgggactggtttaggcttggcaatttctaaagaagtgatcgaagcgcatcgtgggcgtgtttgggttgatagccaagaaggtaaaggctcgacattctacatttcgttgccatatgaaccaattgattctgatggaggtgagtgggatgcgatttaataactttttaatgcgcgttatactgattgctgccattatcgtcagtatcgggctatcatggctaatctggaccagtaacgcgcattatgagcgccaaacggacagtcaaaccaccactaagtcaacaagtcgtaagacagaacgaaaaatcggtgatatcttcttgccgacgcaactattgtggcggacagacaatcagagtcagttgatttataactcaaaagagagtttgattccacagtttaaagcgactttaaagcttgccaagtcggcacagtttaagcaagttaagctaagcgaagacgattattaccaggcaattagtgaggatcatacattgacccttttatatcctgataatatttcgtacgctatttttaaaaaggtcttcagttatcagaataataatttaggtcaaaacgtgacattcaatcggattcgaatcacgttgggcacacagcctaagttgtggttgatgaatgatcaaagtcatcaagtgtaccaaacgacactcaatgttttttcacaagctcgtgtgaaaaaggtgcttaaaaatgccgatgtgcatttgaaagtgaccgaaaaaatgttgaatcacaagccattactctatgtggcagcggatcaaacgttgttgccttatagttatttagttaatcaacaacccgaaaattattacatcacaacgctgttgaatcaacaaaatacggataatattgatacgaaagaacaaggcaatagtgcgatttatacggatgggacggacagcaatttgtataaacgcctaacgatcaaccatgataccggtgaaatttcgtttgtgaagtatgaaaatgagaaatcaccaagcacattaacaaagagttttgaagccagttttgatgcgctttcaaagacaggtaacgccctttcagggatgcgtttctatagttatgataaagcaacgaattcgactgcttatcggacctacgttgaaggattcccagtcttttatcagactaactttgggagcgtgaaagtacaattcttaccaactggccaaaagattgatttttcaaattatagtttgcaagtacccgttcctgctgaagacaagcaagtcacattgccaagtaccgagtctgttttgaatcaattgacaagtaatggtttcttgctagaaaatgtggaaaacgtgcaagtcggttatgaatggaccaaagaaaccagtaacgaacaagtgattgatttaaatccaacctactttgtacagtataaaggggtttggcgtagcttatccgcattgatggcgcaaaaagctgaattaaccgaagggagttagatgaatggattttcgcagaattgaaatgatttttatcgccatttttattgcgctggatatctatttatttgcctcgctgaaaggcagtcagacaataacgtcgacggcgattactagtggttcacagactagccagattatgaaggatttaaaagacgatcaaatttcagtgaagaaactctccaagcgccgaacggatggttattatttagccagccgacaaaaagatcagacattattagaaacggcgagtgccaaactaaccggtcaaactgtttcgtttgataaagcgcgcatgacactgacgagtgaattggataaaccactgacttacaaaaaagggaaccaacgcttagccgtggcggcctttatgaaggaaccagacaacgtgattcaagcggaggactaccgctattcacacgcattatcgagtgatcaacaagtcgtatatgtgcaaaaagtcccaggcgggcagatcatggatgaacatggtcagttgatttttacattagaagacgggcagattagtcattacacgcaaacttacacgaataagattcaagttttgcgtgaaaaagaaagtacgaaggtgactgctcaagacgcggtcattgatttatatacagataatgagattccgaataactcacgcattatgtgggtgaaactcggatacagtgctttgttggacgccaatagtagtacggtgtacgtgccagcttggcaagtggccattgagaataagaattctaagagtgtcgtcgttaagcggattaacgcctttaccggtgcgctgatgaagaaccgtagtgaaatttagttgttttagaaagagaccaaggggatagagcaaaacatggtagaaaaagacgcaatgcaagtcagcgtgctcgcaagcagtagttctggcaacacaacgtatattgaaacacctaatcataaagtgttagtcgatgcaggaatgagtgggaaacgtgtgcaagatttaatgcatagtattggccgcgatcttaaagatgtggacagtttattagtgacccatgagcatcgcgatcatagtagtggtgtcggtgttttggcccggcgatacggaatagacgtgtacgcaaatcaaccaacatgggatgcgatggcttcgattattggtgaagtgcctgctgaacacaagcacatttttgaaatgggtagtaccttgtcagttggtgatttagatattgaaagttatggggtgtcacatgatgcggctgctgcccaattctaccaattccatcataataaccgtgcctttgcaatcctgaccgatacgggttatgtctctgatcaagtgcgtgggacaattgaaaatgcggatgcttatttagtggaatgcaaccacgatttagagatgcttcggatgggaaagtatccttggtcattgaaacaacggattctcagtgataccggccatttatcgaatgaagatggggcatccgctttgatgtcgtttatggggaaccagactaaacgcgttttcctaggccacttgagtcaagaaaataacatgaaggaactggcccatttgacggttgcgtcgatcttaaaggaacatgattatggggtgggaacagactttgaaattctagatactgatccggcagttgctgatccattgtttgccgtgtaattagactgaatagaagacattttagttgtttttgcgaaataagttcgctaaaatgcggattagaaaaacaatttaatattcgtaacttgttcataattttttcaaatttacattctatgatagagataatcaataaacagaatttattagaaagtttgggtgaattagtatgaatcagaattcaggattaatgaaaacggctgttgttgccgttattgcagcactaatcggtggtggcgttgctggttatgccggttcaaagatgggaagtaacactgtctcaagcactgcccaagtaccaactaaagcaggtgccactaaaattagtaatatcaaagtcaactcatcttcacaaacaacaactgcctttaataaggtcaacaaagcggttgtgtcagttgttaacttgcaaaaacaacaagataattcaggcgatttgagtgcgctctttggcgcggatagtaccaataaaaaaagtagtagtagtgagcttgaagaatcgagtgaaggctcaggtttaatctacgaaaagaaagatggtaaagcctacattgtcacgaacaatcacgttgtttctggctcagataagttggaagtcatccttagtgatggcacaaaaattgatgctagcttagtcggaacggatgccgtttctgatttagccgttttaaagattgatagtgccaaagtgacgaagaccgcaacgtttggtgattctgacagcattaaacctggtgaatcagtgctcgcgattggttcgcctttaggctcagaatatgctacttctgttacccaagggattatttcagcaaagaaacggacgattgatgtgacggatgaaacaaccggtcaagcgactggccaagcaaccgttattcaaactgatacagcgattaaccctgggaattcaggtggtccgctagttaaccttgcaggacaagtcatcgggatcaattcaatgaagttagcttctaacgggagcacaacggttgaagggatgggctttgccattccaagtaacgaagtggtcaaaattattaaccaattggttacaaatgggaaagttgttcgaccagcgcttgggattagcgtcatcgatttgacgaatgtttcatcaacgcaacaatcatcagtcttgaaattaccaacctctgtgaagagtggggtagttgttgcatcagtcaatgccaactcagttgctaagaaggcagggattagtaaatacgacgtcattgttggtttaggtggcaaggatgtcacaagtgttgctgatttacacacgacactttacagttacgatatgaatagtacggttgaaattcagtattatcataatggtgaattgaagaaatcaacagtgaagttgactgaagcagcatcaacagatagtacaacggcagcaaaataaattaaagccgccagcatcaattagatgttgacggcttttttattttggttaaattcagactaaagtggcaggaatgttaagttttaaaaatgtcaatgtggatagtaacctgggaagaaatccgagcgtctgtggataagtctgtggattgtgggtataacacggttaaaaggtctttttagttatccacaaaaaaattaacaggcggtggataacttttttaaaattattataacaccagaataacgctgatataaaaggatttgtaaccggataatttgagaacgaacaatcaaaaaagggtggataacttttttattaaatttaacgaaaaaatttaggtgtcggttatttagtatcaagaaaaattcgagataccatatttgggacgaacacttgtgcatatgtggacaacttttgtggataagcagtactttccggtgaattactgtgaatagctttttttctgcattgttttcccctaaaatgtaagtaacagtaggaggctatttatgaacattaaagtaatcacagttggtaaattaaaggaaaagtatttaaaagcggggatcgcggaatatgcgaaacggctcagtaagttctgtaagttcgaaatgattgaagtcgcggatgaaaaagcgcccgaatcattaagtgacgctgaaatgactaacgtcaaagacaaagaaggcgaacgaattctcaacaagattaaagataaggaacatgtgattgtcctggcgattcaaggcaaacaacgtgcctcagaagaattcgcaaaggaaattcaagatttggcgacctatggtaaatcagatatcacatttgtcatcggcgggtcactcgggactagcgatgcggttaacaaacgcgccaatgatgcactttcatttggcaagctcacactaccccaccaattgatgcgcttagtattgacagaacagatttaccgggcgtttatgattaatcaaggaagtccgtatcacaaatagagataggcataaaaggcctcattgttgaatgaggctttttatatgcaacaagagagagcagcttgcaacaaaacaaatagtcatcgaattaagcgagatcttctgctatctttaggtttgtagaggaggcgagttaatgaaaattatatttaattgggattcaaagtgtgcacaagatacgattgtcgttcacagtcaaccacagaatcaagcaacggttgaatctgcttttaagaagctaacctttgatcaatcgattcaggtgcgagatgcgcgaacagatcgattacaaaacatatcattaacggcaattgaaagttttacggcctttggacatttggcgaaggtggcgacaatcgatggcaatagctattactaccctagtaatttaaaataattagccccgttttcgcagaacggttttctgagaattaataacacaacgattttaaatctgcagcaagttgccaattttgcggtgggttcaaatgcgcgattggtggtctatacgcaatctggaagacagtatattgttagtcggtattatgccaagcaaataaaggagtggttaaaatgatgaagcaaatccgcaaagactttaatcaagtggcattaatggcgattatgtggctcactgttgtcacaacgctaacgcggggcgaagcgctggctgcttggcgattagttagcctaggcgtgttgattggcattgtgtttggcgtcatttattcatacttatggcgctattcgacgttcggtgcgccgtggaatgttttgattagtactattagtaatattgggtttcaaatactcgctttgaggctctattcgacaacgttatttgatgttgtttcaccgtatttattagggacgtcgttattaacattcgtaatgcacgtgattattttttattactacacgcgctatcaaaataagcgcttagtgaacgaattgaatcaaaatagaaaataaacttgttgtcccctttgcaggttgtttatactagaggaactaggactatttgttaagtagaaatgaggggaatcagatgacgaagagacaacggaaacgactttggctagcaagcggtgtgattttactaggattagtgattcttctaattggatggcaacaccagaccgccgtttttgctttcttggatcaatggcaaaattaccgccaatatgtgcttgagattcgtcatctggggccgtatgctttcttggtgtttggtctgttaatgattggggtcaccttaattccgggtgcgccaacatcagcggtggcattgattattggcgcgtgtttgggtcattggggtggtttcgtggtcaatgcgattggcttgacgatcgggaacttgttgcaagtccaattatttgcccgtgtcagaaatcatcgcagtaaaaagccggattcgcgtgtttaccgcgcattaattaagatgcaacatccagcgcttggtgtattaattggctatgcagtgccgatgattcctacggcctttgtcaacttggcggctggagacacccacctcaccccccgagcacagggcctggcgtgctttgggggttcaacgattgtcgcgtttatctacgcctttgcgggcgatttgcttattttgaagcaagattggaagagtttattgattctcttgatagtcgctgttgtgattggtttaacggaatatggtatccggatgcggcggagtgataaagctcgccaaaaagtcgaacagtttgacgcattaaattaaagttagaagacgtcctgaggaggacgtcttttttatttgtatgaaaatgtatatgataaggtatgatattaaaagtgattgatatactgaagtaagctcgttaaacgaaataacttatactataataaatataaaagaaaaatacatggggcacgcaatcgtgagtaagaaaaatacacttttggtaacattagcattattattatccaacacaatggcgggactcgatgggacaattatcaacacggctttgcccgctattatcagtgatttacacgggattcaatatatgggctggattgtggcggttttccttttggggatggcggttgcgacccccttatggagtaaattaggcgaacggattggaaatcgtggggcttaccagctggcgacattattatttgcggttggttcgatttttcaggcggtttcggggaatatcgtcttctttctgattgcacgaacggtgatgggcatcggtgctggcgggatgaatactttaccattcattatctatgccgacttatacaaaaatttacgcaaacgcgcgcaggtgattggttatgcgactgcgagttatagtgcggcttcaattgtaggacccctaattggtggctggattgtcgatacgtttagttggcattgggtcttttatatcaatgtaccaattgccctagtatcaattgtttgtgttcgttatttctttaaagaaacgcttaaatcacatcaaaccggaaacgtcgattatttaggtgctgggattatgattaccagtttggtgactttattgacggggattcaaatgattgggacgggttcgctagcactcgttttaggattggtatttgctggtttagctttattagttgtcttgtttagagttgaagaccgggcagttgatccgattgtgccgaaccgcttatttaaaaatccgcaattggtgaccgactttattttatttgttgttttatggggcgcatttatcgcgtttaatatctatattccaatgtgggcgcaaggtttacttggattaagtgcgctactcggtggaatgacgcagattccaggtgcggtgaccaacttaattggctcattggcgggtcccgcaattcagcctaaattgggtaaacaccgcgttgtgacattgggaacagttgcgtttttaattgcgtttagcggtatgttgatgatgggcgaccaagcatcgttttggttcttactgttgatgggggcctttgaaggtttcgggctcgggatgagttttaacgtcctacaaatcagtgttcaagaagatgccgaagaacgtgatgttcccattgcgacgtcgtttgcctatctcttgcgaattctcagtcaaacattcatgtcatcgatttacggtgtgattttaaaccatgccttaacacgcggcattgccgaatcgcacggtcaaattacgatggcgatgatgaataagttaagcaatctccaacgcgttcacgaattaccagcgcacttattaccagcgatgcgcgcgattatgtaccaaggcttgcataacatcatgctgattgcgacagtcctattggtgattgtgctcgcgtttaatatctggttacagatgaaggcgaaaaaagaaaattaaaaaaagtgttgaaggtcgtgagtaagttggccctcaacactttttttaataataatattttaaatcactcgccgggcttgggtagttatagatggtatcggtgagttccgttgcggttgtctgatgtttaatcaggttggtaaagtaattaatgagttcttcagcaattgtggtgtaagccgcagcaccgacgagttggttagtttgattgtcaaaaatggtgatgaccattgcgtcggattcttgaatacgattgaaggtataccaatttgtgacggtttgttgattaatgcggtattgactaggagcagcttgtgcagttgcaacagaaacgcctacttgtgatatttgtgggcttgcatataccgtatgtggaatgagtgggtaagtaatgggtgctgtctttttagcgagtagttggttggcgacatagcggccttcaaaaccagcaactggtgttaatttgggttggacacgatctacgacgtcaccaatggcgaagacgcggggattactactcattaaatggtcattgacttgaatgccatgctggttcgctgttaccccagctttttccaatgccagttggtcgatattgggtttgcggcccattgcggcaaaagcggcgtcgactgtcagtttaaaattagcttgattactgagagttagctgattgctggtttgcgtaattgttgtgacgtcagtgtcaaaatgaaagtgaatgcctttttcctgaagactggtgacgagtttatgtgttaaaacttcagggaagtcgcgtaaaatacgctcgttatgttgaataatatggacttctgcaccagcagtaactgcaatatttgccagttcaatggcgatatacccgccaccaataaaggcaaccttttctggtaaacgatcgaggtctaaaaattcattactggtttgtagtaaatcgtgaccctcgattgtagggagcgttggtgtttgaccggtcgcaatgatgaaatggtcggcagtgtaagtgtcaccattaatctgcaaggtttgagtatcactgaagtgggcggtgcccgtgacggtttggatgccggcatgttgtagaccgttgagggtaccagttgggatttgttgcgtataagatcgcttaaaggccatcagttcagaccagttaatagcgctagttccgactaagccatttgtttggagcgcttgttgattgtcgagtgcttcgacagctgaataaagcatttttttaggatcacagccacggttggggcaagtgccgccccataaatcattttcaacgactaagacggactgttgttcagcgagactgtaagccgccgctaagccgccaggaccgccaccaataatgattgtatcaaagtgtgtttgcatattaagacctcctcagatttcaattcgggttcatcttagcatagtcacaaagcgaatcaaaaaaattggattgggtgtttaagcacgtcaattggtgggctgattgctaagtggtacaataagttaacaaatcgttaaccggaaaaaggagtagcacatgattgaatttgaaggtgtcactaagcaatatgaacaaagcttagcattagatggcttgacgttaaccattccagacaatggtctatttgttttggtcggaccgagtggtagcggaaagacaacaacggttaaaatgattaatcggttaattgaaccaacgagtggcacaattaagattgacggccaacccatcaatcaaatggatctccaaacgttacggctcaatattggttacgttctacaaaacattgcgttgtttccacatctcacaattgaggaaaatattaccattcaattagaggtattgaaatggaccaaagctgatcgtcaaaaacgggcacgcgaacttttggaaatggtccatttagatccggatcagtatgctagccgttatccaagcgaattatcagggggacagcagcagcggattgggattattcgtgcgttagcaactagtcctaaggtgattttgatggatgaaccctttagtgcgcttgatccggtgacccgtacacaattacaagatctcgttttgagtttacaaaagcagctgcataatacaattgtatttgtgacccacgatatgaaagaagcgttgcgcttgggcgatgaaattgcggtaatgcgccaaggcagtattcagcaagtcgggacagcaaaagcgatttttaatcaaccaaaaaatgaatttgtccgcgaattttttgacattgaacgccaacaagcaacgttgacagttcaagatttattggcggccgatttaggaactgttgttaataatcagccgacaacgattacgtccagtgcaacattagctgaattagcgcaacaattagtagaccatccagatgggggcgtagttgccactgatggtcaagaacaacggcaattgacgatgaccgatttaacaacgctcattgcgaaacggggggtatgacgatgatgcaacagattgaacaaattttaacgacccaatccggtgagttgctacaagcacttgggcaacatttggagatttcgttattggcgttattaattgcggcggctatcgggattccgttggcgattgttttaacagctcatcagaaattagctgaagcaatgctgcaagtcacgagtgtcttacagacaattccgtctttggcgctcttaggattattgatcccgcttgtcggaattgggacgattccggctgtgattacgttagtactttatgccttaatgccgatttttcaaaatacatacactggtttgatcggaattgatccagcattaaaagaggcagaaatagccttcgggttgccgcgcgctaaacggctactacggattgaactgccacttgcgatgccgttgattatctcgggtttgcggattgcactcgtgatgattatcgggacagctaccttggcggccttgattggtgcgggcggcctcgggacgtttattcttgttgggattcagtcaaataataacgcactattattggttggggcgacactttcagcggttttagcgttagtggtcagtgcattaattcgctggttagggacattatcctttaaaaaaatcacagtcagtttagccatttttgttggccttttcggtgtgatcgaaggaatgacacggtttcaagcgccgcagaccaccatcacgattgctgggaaattgggtagtgaacccgaaatcttgatgaatatgtatcgtgatctaattttagaagaccagcctaactacaaagtaacggttaaacctaatttcggtgggaccacattcttatttaacgccttgaaggctgataagattgatatttatcctgaattcacaggaacggttttacagacgttggtgaagtcgccaactaagacaaaccagaatccaactaaaacgtatcaacttgcaaaaacatcgctacaagaacagttcaatatggcgtacttaccgccaatgcgctatcaaaacggttatgacttggcggttactgcggcctttgccaagaaatataatgtcaaaacaatttcggatttagccgctttgaatcaaccatttacggccggttttgatcctgatttttatcaccaaaaagatgggtatcaagggttaaaggacacctatcaattaaatttaaatgctaaaattatggagccaagtattcgctataaagcgattgcggacggcaaggtcgatgtggtcgatggttatacaaccgatgcggaagtcgcacggtacaaactagttgttttagaagatgatcgtcacttcttcccgccttatcaaggggcaccgattatgaaagccggctttgccaaggcgcatccggaagtcgtcaaagcattgaatcgcttggcaggtcagattactgagagccaaatgcaagagatgaactaccaagtacaggtcaaacaccgcaaagcacgcgatgtggcccatgattacttggttaaacagaaattaatcaggcactaacgaacaatgcttgaccttcacgtcacgtcaggccttatagtgggttttgaaggagggaaggcaaatggattatcagattaaaactttcgctgaattgaccggggtttctgagcgtacgctacgttattatcacgagcgcggtttactggtgccaacggttgctagtaatggttatcgaacgtattcgagccaggatgcagatcgactgcagttaatcttaatgtaccgtcaactacagtttagtctggctgagattcagcagctgttggcgttaccaccggccgagcgtctggaacgcttagcaaatcagcgggaacaactggttaaacaacaagctgcgctaacggcaacgttagcacagctagatgcgacccttcaaaatcaaaccggaggaattcaaatgacagatcaaactaaattcaaacagtttaaacaacaggcagtggctgaaaatgagcaacgctacgggcaagaagtgacgactaactatgggaaacaagccaagcaagaagccgatcagcactttttagggctaagtgaggcccaatatgcaacgatgcaggcggctgaagaccgattgaagacggcattacaaacttacttggaccagccgcaattgccatcagaagcggcgcaaacagcctttgaagcccatcaaacgtggttacaaacagcgactccccggtatagtctagcaatgcaccgcggtttagcagccatgtatgtagcagatgaacgatttacagcatactacactaagttaattggagatcaacgcgtagcggaggctttacaaacgattattgaatattatgcaattgaagcctaaaaaaggactgacatttgtcagtcctttttgattatttagcgggaattttccgtaatacccgtgctggattaccaactaaaattacgttacccggataggatttggtcacgacactgccggcaccaacgacaacgttattgccgagcgtgattcctggcagaattgtgacatttgcaccgagccagacgtgattgccgatagtaatgggactagaaatttctttttttgtcgcacgttctaaggggtcaattgggtggtaaggggttaagagtgatactcctgggccaaatttacagtagtcaccaatggtgactggtgcttcgtcacaaataacgacgttacgattggcgtaaaaatgatcgccaatcgtaatgttttcaccgaagctaaattcaaaaccggtttcgatgaaaaaatcgctaccggtatgaccgagtaatttttggatagtggccatccgtgcatcgttatctaagatttggctggccttttgtaaggcaaggcgggctgcatcccgtttttgaatagtgaccgctgaatcaaagtaccattccccgttggtcatcgccctaaaagcgtcgtcagtttcgtgcatattataagtcgcctccgttaattgtactctctaacgatagaacaatttatcctggagtgcaaatccggttagtgattgcagttcggaactatctatgggatgctaatcatagataatttttggagggcaatacgatggataccaagcaaaagctagcagataccttaaaagaattgatgaaaacaactccggtcgatcacattacggtcaatcaattgacaagcagtgctgacgttgcgcgcaatacgttttattaccatttcgccgatattaatgagttggttgcttggatttataatcgtgaaattgttacgcaactggcagtgtatcaacgtgaacgggattggggcgtcggtctagatgtcttggtaacttatattgaaaataatcggcatttctgtttaaatacgtttcattcacttaatcgagatttgctaagtcgctttttgtatcgagtcgcttttagcatggttgcaggggttgttcaagatttaaaggtggattgtccagcgactttccgagatgaaattgccaatttttatggttgggcattggcgacacagattacgcaatggcttgtaacaaatctacaagaatctaaagaggaattttatcagcgcatgcatcgcatgttaaatggtactgtgaaccatgttttacaaaataatcattagatttggacatttatcctgaattgaccatacagaaaccgccagcttgcagttaaagtaagaatgtaattagcaattatttctttggaggtgactgatatgtttttatttcaaaatatttcaggaatggattggctagtttggggactagtggttattgcattaatggttttaaatgaagcagctcgggctaacaagtggattggattaattctctttgttgggttgccagtcgttttaacgctctttgtttggccaacgacggctggtcctggtagcagtaccgggacttggttccactgggttaaagtgtactcagcattagcaggttgtttagggtttatggcgctgcgctttatccctaagttacaacacaacaagtgggcattgattttcccacccgcaattttagcgtttaatattatggaagctgtgattcgtgattttcaagtttcacacctacatggcttagtcgacggtgtgatcatgaatggtggcgcgtggaatatcatgaacgggattgccggaattattaacatcatcacaatctcaggctggttcggcattattatcagtcatgacaaacaaaaagacatgatctggcccgatcaaatctggccttggattatcgcctatgatgtttggaacttcgcctatgtttacaattgtgttggtgatcactcattctatgcgggcgctgcattattaatttcatgtacattagcagcattcctggttaaaaaagggagctggctccaagcacgtgcgcaaacattggctttttggatgatgtttacaatgagttatcccgcttttgtaacggattcacaattttcagtgcaaggtacgcacagtagtgctgctttgatgacaatcagtggtttagcactggtcattaatgtggcagtcttaattctccacatttatcgtgtcatgaagtataaacgcaacatcctaactgacgaagtctatgctggtacaaaggcctatgaccaagtcgtggcagaaaacacgtcggaaggtaaataaaacgaggctcaatgaaggcgcagttcaatttgaactgcgtctttttttgcattttatagtatgatagatcctataaaggcgggatcaacatgacaactttttattttgtacggcatggtgaaacgatggttaatcgagtacagtgtttcaatggtggtgggacgaattcaacattaactgaggcggggcaagcggctgctaaacgactaggtagtttattagcggaccagtcttttgatgcgttactgacgtcaccattaacacgtgccgttgaaacaatggatgcgatagtgtcgcagactaatcaatcacaaccggcaatcatggtcgtggatgatttaaaagaaatggcacttggtgattgggaaggccaacctggtgctagtttgacgaaccatccacaatatgaaaattacttccatcatccagagctgtttgatgccaaacagattcacgcggagtcctaccaggcggtcttagaacgtgggatgctcgcgattaagactgctcaaacggcgtatcctgatggtgatgtattagttgttgcgcatgggattattttattgtttgttatcaacacactactagggattccgtttgaggaaattcgatcacaaaaaatggttgctaatgcaagtctatccgtactaaaaagtaaaggcacgcagtttgaaaaggttgtgtggaacaaaacggtttaggaaggatttctggatgacaataattatgattcttttgatcgttgcgttgggcgcttttaccagaacggtttttgggtttggcgaggcattagtaacgatgccattattggccctaatagcgattgatttaaaagcggcaacggctttgattggcgcgctgggactaattgtggcgattccggctgtgattcgccaccgccaacagattgatatagcggttgtcagacgactagtgattggttcattattgggtgtgccagtcgggatagcgttgatgacgtatgtgccaacgacgattgtgttgagaacgttagctgggtttttaatcctttatggcagctataatcgctatcagttacaccgacatcacgtgcagcagcaacatttacagtcacatcattgggattatttagctgggataatatcaggcatgatgggcagtgcctacaatagtcatggtgtgccggtggtgatttatgggacattaaaaaaatggccagtagcatcgttaaggggcattctacaggcccattttatttgtgttgggacaatcgttgtaatcagtcatattctagcgggcttttggaccatccaagtattgcaactattgggacttagcttaccattattgttagttgtgattccgttgggcaattgggtgagcactcgaattgatagtcgaacgatggtgcggtatatttatgacttattaatcgtttttggttgtttgttgctgtataaaacgttgtaaaaggtcattaataggtggttggtttattaaatgatgtaaagcttatggacaacgccgcagatagtatactaaaacgatagtgtataaagtttaaatactaaggggcggaaattaatgagtaaagtattagttgttaaggcgcatccacttgctacagaacagtcacggacgttaacgattttggcgcagttcatgcaagtttatcaaaaacaaaatccagctgatgaaatcagttggttggacttgtaccaatctgacttaccagaaattgatcaagaactaatgacggcatgggcggcgttaaaaaagggcaagctatggccaccttaagcgctagtcagcaagagaaggtcgctcggtttaatcgctataccgaccagttcttagcaaccgataagtttgtgattgctaatccgctttggaatttaaatgtaccgacgaaacttaaagcgtggattgacacagtgatggtggctggaaaaacatttagacatactgaaacagctccgcagcccttagtaactgggaaaaaagcagttcatattcagtcagccggaagcgtttatgctggccaagattttgcaacacaatacgttaaaacaattcttggctttgccggtgttgacgaagtcattaaaattagtatcgaaggaattgattattcgccagaaaaagctaacgtgattatgcaggaagctattgaaacagctaaacaaacggcacaagttttttagaggcgatatagtggagggataaccatggattttgaattaccgatatatccagaaaatcaggcggcaatgaagaaatacatgcagagtcaatttgaatttaacggtgttaaagcaccggaccgccatttaattgaacgcgaattgtggcagtctgtgaaacaattgccaccagcagaaataatgcagttcattgagaccttatatgctcgaccaacgcgtgagtatcaatatgttgccatcgagatggcattgcgttcagtacgttggtgggaaccggctgatatggaacatttattaacgttggtgttggaaaaagtttggtgggacagcatcgatgcttggcgaaaagtatttggagagtacatcagactgcatcctgaacagtttgattgggttgtacagcattttataggtgctgagaatttctggctgcgccggattgcgattacgctacaactcagtttttacgaaaaaacgaatgtggcgtttttggaagaagccattctggcagatattgacacagatgagttctttatccaaaaagcaattagctgggctttacgtaactatagtaaggaaaaccctgagtgggtgatgacgtttgttgaagaacacgaactaacaatcttcgcccaacgtgaagccttaaagaaaatcaaacaaaacaaaatgtttcacaggaaacatacaaaaagcagcacccatgataactaatcaagggtactgctttttaataacttaatttaagagggtaacagctaataacaagtattaatggtactaggataagctaatttattatttatctaaacccgccagaactttagccggaatttgattcttggacacagtattaggcccttttaagacgcgttttgaattaaattcaactttgacatagctgttgggagtgagtggcgttggattttcgccagtaacttcgacagggaccacttggtggctaccatcttctttcaccacatttagttggtagtgatagctatacatattagtcactgttttacctgaatcatctttggtggcttctttagctggagattgagcagcaactttggcgtagcctacttcgccgacatacgtatttttgtattaacggtagccagcaaatccgacgatgatgagggcgattaccgcaataatgctaattgtttttttcattgaatgagaactccttattccgaattgataaagttatcatacgatgttaagcgtaaaaaagcgacgattttaagatcagatgacaaaagtgttagccgagttaaggccattgtcacctaatgtttaaattggcggtattgtgcttctaaaatagcgctatctaagatgtgaccgcgcattgccgctgtcatttgatttaggtaaaagccaggctgtaaatcgagcgtggtatcaagtgcaaatactttaagtgtataagtgtgatcgcggttagggggtgtcatcccgccgtagcaagcacttgcttctgttgataaatggtctgttttgggactgtgccaagtattaacaccttggatgaaatcgggcgcttgttggctagcattagccgcgacagtggtcgtttttaaattggcaagtgtccagtgaatccaaggaaacccttgcgtcacttcgtaggcatctagatcgtagaaaacggcagcataactgactgtatcgctaggtgcgtcttgaatgttaaacggaatggaataagttggcacaccttccgcgttaaattgagtgccatgaccgccgtagaggtcgtcgaagtagccgtgatgaatgccagaactgataatttgcatgttgaatctcttttctattttagattttagtccagtcgtcaattgagcgaccatttgtgtcgcatagttcgagccaactattggtgccaccaaagtacaagaagaggccgatttcattcacgctcttgaaaataatgtcttcagtcgtttgattgtcttgaatttgcgctgcatgttcgttgcgcaagtgagtgcccattttagcagcaaagccaaacgagccatccttattaagtggcgcggttggccacaattgtgcccccgctttcaataacatctctttgcgcttttgccagatggctgttccttgtgcttcgcgcgtagcaacagtgaattcgatttggctgacggcttttgtccatcgatgacgtgttttagccggttttgctttgactggtacgcttttggtcaggggataaccaaagcggctgaggaccaagatgatggcttcaacggctggagctaaggttgttcggaaattttgagagacgttggacggaagcgaggtgctcgttatcggtggttgattttgttcggctaatagctgccctacgtagccaatttgttcagtccactcaggatccatggtaatccagatacccgtgtcaacttgatcagtcgaggctgtttcaagtggggagagttgttcaatttgttgcagttgttgctgcgcaaaaccgaggaataaagcggggtgtgcgaatgcggttgtattagccggtgtttgttcaattaaaagctgagtaacgggttgttcgattaaatcgacgatcgtttgggtagccgttaatgttgcattaatttccaaggtcataggaagcctcctgacagtctttgatgcttctaattaaacactaaatcgctggttttgtcagccagtaagaattgattgaaggaatgcttgaaactgagattcaattaaccggaattaacgaatctttgttatgatagaaggtaggaattttaacgggtgggagaaatggcatgcaagcacaagcggtactaaaagaaaaatttggttatgatcactttagagaaggtcaagcagatgtgatcgaatcattgttggcaggcactaatgtcttggcgattatgccaactggtggcgggaagtcattgtgttatcaaataccagcattgatgctacccggtttaacgttggtggtatcaccgttgatttctttgatgaaggatcaagtcgatgcgcttaatgaaaatgggattccagccacgtttatcaatagtacgctaacgcagggggaagtccaagaacgctttaaccaagctgcgcgtggtgaagtgaaattactatatgtttcgccggaacgcttggattcggattactttttagctgatttagctgaattaacgattgatttgattgcggtcgatgaagcgcattgtatttcgcaatggggccacgattttcggccaagttatctacgcctgacggatacgattcagagtatgcgccaacgaccaacgattgtggctttaaccgctacggcaacctcacaagtggcagctgacatcatgcaacggttgaacattcagcacgaagttaagacggggttttcacggcagaatcttgcgtttcaagtagttaaaaatcaaaatagtgatcgctacttaatcgattatttaaaggtcaacaaacaaaaatccgggattatttacgccagcacacggaaagaagttgaacggctcacgaagctgattgaaaaggctaagttagatgtgacaatgtatcatggcggattaaacgaagcggtgcgtcgtcagaatcaagaggattttctctatgatcgcaaaccgataatggtcgcgactaatgcgtttggcatgggcattgataaaagtaatgtgcgctttgtcgtgcatgcccagattcctgggagtttagaggcttactatcaagaagctggccgggccgggcgtgatggcttgccgagtgaagcgattctattatttaaagtgaatgatgtgcagattcagcatttctttatcgatcagtcggaaatggacgaagcgcataagcaacaagaatatgccaagttgcaagaaatgacgcagtacgccaatacgcagcaatgtttgcaacagtacatcgtcaattattttgatgatgattgtgaagcgtgcggccggtgcagtaactgtctggatacgcgtgaagaacaagacatcacgattgatgtacaaaaagtcttatcgtgcgttaaacggatggatgaacggtttggcaaagtgttggtggcgcaagtattgacgggctcgaagaatcaaaaaatcatgcaattccgctttgatgaactcccaacgtatggtctaatgcgtggtgattcgcaaaaagaaatcagtggtttgatcgattacttagtcgcttcaggatatttgcaagcttctggcggtcaatacccagtgctgcaaatcacggcggcgggagttgcagtcttaaaaggccaagcgaaagtgacgcgcaagatggcggtcaaagtgcaaaaaacgttgcctgaagataatgaattatttgaacaactacgtgagttacgccgcgatttagcggaagaacaaggtgtgcctccgtttgtgattttctcggataagaccctatattcaatgtgtgaaatcatgccaacttccttgactgaaatgctagatgtcaaaggggtcggcgaaaataaactagaaaaatacggcgaacaattcttggatatattaatggcagaatagagtgctgagcattgactggatttaccaaattggcgatgtaatcgctgatttggtaaatttggttaagtgcagaaatatgctggcgagaacacgtttcaacaaaaaagcgtcaacggattctaatatccgttggcgcttttttagtatctagtatggtgcatctgctggattaccatattcaaagtgttggtttgactttggattgggtttcgcatcaggtagtaaacacgtataacgtgtaccatcaggaccttcagctaggaagatgcgagtaaaatcattttcagtttcgatcagcttgcagttttcgtgggttaacccataaacatcagttacttgcgtaataatcatctctttttcttaatttgaaaggagtagagtaaccgtacattctaccaccgacttaataataagtatagacttttattgataaaatttcaaattaatccccttatttggtttgagtttcaagctggtggagggtttgtttcaattcaagtccgccacgataccccccaatttgcccgtctttacggtagacgcgatggcaaggaataatcattaatagtggattgcgaccaatggcagaagccactgcgcgaattgcggtggggtgcccgacttgagctgccaaagcgctgtaagttgtggtttgaccatatggcatagcttgtagggcgacccaaacacttctttgaaaaggtgtgccgccgataatatcaattggcagtgaccacgtggtttggtcaccatcgagataagctgttaatgattcactataaggagcgattgcagcttgatttgcaactaatttcgtttggggaagaaaagtggttaattcactgatagtgccatcgggtgaaccaacaaaacagatacctttgggggttgctgcaataataaatgattggccagcatggctaaaagaaccatagaagattgttagcatttagaagccctccttttgattgccctcagtatagcatgcccgttaaaaaacgaccaagccgtaaacaggctcagtcgttttttacttagttaagcaactggttgaaaggttttattttgaagatgatactgaacatcacaacttgctgcgacttctttttcatgggtgacaagaatcacacatttttgttgttgatgggctaattcttggaagagatgaatgatctcctgcgtattttgttcatctaagttaccggttggttcgtcggcaacaacgatgggggctgaacagcacatagcgcgcacgatcgcaacgcgttgttgctggccacctgatagtttttgtacgttcttatgggcgagttcgggattgatgccaaccttgctgagcatttcgagtgcgaaatcggcggcactttcatgcgtcgaatgagtaatggccatcgcagtcaagacgttgtcgagtgccgacatgtaggggagtaagttgtaggcttggaacacgatggacacatagcgattgcggtattgggttaagtcgattttttggatatcggtaccttcgtataaaatactcccgcggcgcggtttatctaaccctgaaagcatggtgagtaaggtcgtttttccagcaccactgctaccgatgatgccgtaaagtttgccggcttcaaaatcgagattaacatctttgtaaagtgtattttcttcagtatcgtaccagtaactgacgtttttagctgttaacatagtggacctcctataattatccaatgagaattttgcgtggctcgagtcgtaaaatattgagtgatgcgagtaagacggcaaatgcgatgatggtgaagccgaatgcgccaagttgcattaaggtgacggcactaatcttcagatcaaggtcgcttgctttgacggcttttttagcagattggccaggttgttgcatttgaccacttggccgattgccaccagtttgcccactaggggcttgaccgccaccagggccgccgttaccgccaggttgcatgttatttgtttgtgagctggttgtcgtttcggttgtgacggaacgcataacttgtttgctaagcgcttgaccagcgaatcgtccgccaatgccggctaaagctaaactgacaatcagcagcatgaacatttcaactaataattggcccacgattttgacgcgcttttcacctaatgagagtaaaacgcccatttcataacgccgttcgcgaaccattaagataataattaatgcgaggataacagtgccagcgatagcgactaaccaaacaatcttattagcaaaactggccattttctgcatggattgtttgagtgattggtaagtactgtcatcagctgttaccgtgaatttcttcgtattgataatcttcttcgctgcttttacaaaactatttttcttagttgggtcactaagcgtgaatgtggcactatccactttgccagtttgacctttaatttggttagctaatgtgtatgccgtatagatgacgtttgcggggtctgtttgttgtggacccatgccagcgctactttgactagccttatagatcccgactacttttagcgtataggcttttttgcctgtcgtgctggctttgactttaatggtgtcgccgactttgaggctgttttctttagccaattcggattcgatgacgacattattagtgtttttgtcgctactatttaaagcgcgacctttcgtgattttacttgtattatctttaaagtcgctgagggttgcggtattgagcactccggtgatttgtaagtcacctgttgaagtggatgactcagcgttgccgccagggccgccgtccatcatgccaccactattatttgaactacttgatgtcgtaatggctttaatggacgaggcgttcgcagaagtcgtgacgctgacgttataatttgccagcccggataatttcgaaatagccgttacgtcttttaatttgacggagggcatggttaatttagggcgcgttgctgtagtacttggggcatcactgctagccgaggcgcgcattttcttaaacgcttgatcgcgatttgcagaaagggtgacgctagcgcccacctgttgtttggtattgttgacggttgtaatggctgcatttctaatcaatagaccagccatgataaaaatcatgatgacggtcatcacaattattaataagaagctacgcccttttttaaagatgacgttttgccaagcacgcttgataaaattcataagtatttcctccttaaaactgaataaatattagtttaggcgggaaatatgaataaattgtgtttgaaatgaagttttttttaaggcgtatttgtgaagattaaccttatagggccaactttctagctcctaaatatggtaaattatagggtatcaaagttaatcggaatgaggagagttaaatgaagaagcgacaacaattttttaccttattatggacaggattaatgttaataatgcctgttgtttcagttattggtagtgcacaaacggtgtctgcgagtgagacaaaggttacacaagtgacaccacgtactgcatctagtacggattatcaaaaagcaatggtggctggggcgcaacagttgttgaataatggccaaccagatgcatggtcagcgttagcagctattcaatcaggcgtgacactgagtgcagcgcaacgcttgagttatcataatgccttggttgcggatgcacaatcaatgctcgctgatcaacgtttttcggcaaccgatttagaagtgttggtaattggggtaacagcacttggtgaagatgcaaccaacttcgctggtttaaatataattgataaaattattgaaaaagcaccaactggtgggatcaacgggcaagtttacggcatcatcgcccttagcatgcgtgattatggtgccaaggcacagcaagcgattgatagtttaattccaacggttttacaagcacaaaacgctgaaaatggctgggcttttttcggtagtaaaagtgatttagatacgaccgggatgacgatgacggcgttggggatgcatcgtgacttcccaggcgttcaagatgcgctagataaagcggtaacgatgttgaaagaaaaaacatttgttgcacaaacgggtggttttttaatccctaatgtttatatgacagaagaaaactcaaatagtacggcaatggttgtcatgggcttaattgcagctggagttgatccagtcacaacatttgttggcgatcaaggcgctaacccgatttcacggctggtcgcttatcaaagagcagatggacagttccgctggaatattaataacgatatgggatcgctagcgatgtcaactgaacaagccgtttatacgttagcccaataccggttgttccaagcgggaaaaggctcaatttatgattttaaaacgccagttattgaaaaagcatcggtaaaggtccaagcagttgatgaaaagggacaaattttaaagagtcttcaattagctgaacaacccgttggtcaaaccattacggtgaatgctaatcaagtcgcagttgagggttatgaattattaggcaatgcacaacaaactgttcaagttgctaaaacgggaacgaccgtgacgttccagtatcggaaacaaatgattgggacaattcctgcagcgcagtttgctgacgttacggtgcaagcagtcgatcaaaacggcaaagtgtttaaaacaattcaattgcagcatcaaagagttggacgcacaatgttgattaatgcatctgatgttgcagttgagggttatcaattaaaagacacgccaaccaaatccatcacgattaatgcagcgaataatacaatcagtttcaagtttgaacgacaagtgactacggttgaaaaagaaaataaacaccaagcagacaatcaagatcatgctcaaataaagcaaaagcaattaccacaaacgggtgttaactcaacagtagttgcttctgtagccggcttgatacttttgactgggattattggcatttggttcaagcgtcaagttgaacatcgttaggagttagatatgtctaaaaagagaatcattgcgattatcggtagtttagttattttaagcggcatcggatacggtacctatcaaagtgtggctcaagataatccgtctacgcgtagtcaacatgttaaagaggaacatagatcaaaaaaacgggtcaagccagcaactgttggtttagatggtaaagttaaatctaaggcctctgagtcacatagtagggcggtatctgaaagtcggaaaacagctgaaacgcgcaagtccagcagtcaatctgaacagacaaatgaatcatcacaaaaatcggcctctagcaaacaattagcatcgcaacaagctgtagaacaaggctcggcagtccaatcggcatcgacccaatccgccattaatcaatcgtcacaatcaactgaaagtaaaccagttacaccgcccactacgacgccccaaccagtccttgaaaaggtgagcgtcaatgtttatggaccaattagtgaaggtaatccgaaatggttgaacggtgatcaagttgaaatcaaggatggggatatggtgattgatgttttaaaacgtgatttgcaaagtcgcgggatggcactatcctatcgtgggacgggcggcggcgtctatatcaaaggcattaatgggctattcgaatttgataaaggaccgttaagcggatggctttatcgagtgaatggcagttttcctaactattcttgtggtaattatcctgttaagagtggagatgtgattgattggatgtatacggaaaatctcgggaacgatcgcaacgcgcctcagggttaaaatcgcaactggtctttgatcaattaaatccaatcgtcatctttgcgtattacgtgattgcaattgcgttctcaatggtttttattcatccgatttttcttgtaagtgaattgttgatgatgattgcagtgaacttgcttgcgaaaaaccagaagaaaacactggggacattgcagggtgcattgttcatgatgctctttatcgtcgtgatgaaccctattatgaataatcatggggcgcacgtgattgcgacgtttggtgggacggtgatcacagcagaggctgtcatgtacggttttttaatggcgctttcgctggcgatcttaatgctagtgtttgtttcctataatcagagtatgacgaatcataagttcttatatttatttgtgcggctttcaccgcaactaactttattaacgatgattaccatgcggtttgtcccactatttattcggcggtttaccaatatcaagaatgtccaaagaacacgtggtgtgcagatggaaacggggagtgttagagcccgatcacatgccgggatgcgtttgatggaagtattattgattaattcattggttgacgcactacaaacggctgattcaatgacggcccgtggttatgggtcacagaagcgaacgagttatcaacgttatcgatttacccaacgggatggttgggtattggcaagtcttgtagcaggcagtgcactttgtttttattttgctaaacaggggattggccgcttagcgatttatccaatacttggctcgattcatttgaatcaaattggttggctatgtttggtgttagtcttattaattgatagtttgccgctattactagaaggatgggaatatttatggtggacattgcgcaaataaaacaatttaattttcagtatgcattggcaacccaacaaaatctgaaagacatcaatttaaccgttcagacgggtgacttcattacgttagctgggaactcgggtagcgggaagaccaccttattgcgccaactcaaaaaagaactctggcccgttggtaaacggtcgggtgagattattttcgagggccaaccgttagctgatttatcgcaagggttaagtgcgcagaagattgggatggtctttcaaaatccggataaccaattagtgatggatacggtcattcaggaactcgctttttcactcgagaatattggtgaaaagagtgcgaatattcaaaaacgaattgccgaattagtcagctttttaggtttccaagatttgctgtatgcttccgtgcatgatttatcgggtggccaaaaacaactggtcaacctagcgtcggttttgattttacagccggatcttttactgttggatgaaccaacagcgcaactcgatcccattgcgaccaaagaatttattagtttattgcaacgggtacatgacgaactcggcatcaccgtgattatcagtgaacaccagttggatgatattttaccgctctctaatcaactttggttgatggatggcggtgagataacgtatcaaggaccggttgctggtggattagcagcaatttgggcgcaaccggcattgcgtgaattcgtcccagatgtgccacacgtctttttacaaaatgagttgattgcaccagctgatattgcggcattaccattgaccgttgtcagtggcaagcaattgattgagcggcgacaatggcagttaacacatactaaacgtgaaatagccacgaacgaccaagcaacaatgctgcaggccaaacatgtgagttttcagtatgaaaaaaatgacccttatgttttagaccagctcaatctagaggttcataccggcgattggttagcgattgttggtaaaaatgggactggtaaatcgacgttgttgaagcttttgattggtttattacaaccgcgccatggtgcaatcaagttacaggggaagaagatcggtaagtgggcgcaagctgaacttttcaaaacagtgggttatctctcacaaacaccgagcgatcatttcagttatgatagtgtccgtcaagaatttatcgaacgggcgcggcagttaaaacgcgcaacaccagaacaagtggcagaagagatgctagcaaagctcggtcttcaaacccttgctgaacgtaacccgcaagatgccagtggcggcgagcaacaattgattgcactcgggattgtattgctagcgcagccgcagttactcttactggatgagccaacaaagggccttgatccgattcgcaaacgggcgttgggtgaattgttaacgcgtttacaagcggaaggcttaacattgattatggcaagtcacgatatggcctttagtgcccggtttgctagtcagtgtgccttattattcgatgggacgattgtatcggaggaagaaccttatgcctttttcgcgcataacttcttctatacgacaaccatcaaccgaatgttacgcagtcaattgcccgaagccctgaattgggaagaggtgcacgcatgaaagctttaaaaaatagttggaccacgtttggattggctttcttgattatggcgattttcatgttgtttatcgtcactttaaaaggacagcattttctgatcttcagttttatctgtttgattgccagtatgctgccattttattggcggtttgaaacccgggatattcgcgcccgtgaaattattttcatcgcggttttagcggcgattgcggcagtcactcgggtaccatttgcaccattgcccagtgttcagccaactagttttgtgattatcgtgtcggcattagtccttggtccagaatcgggttttattgtcggttcgaccgccgcgattgtctcgaatatgtttttgggacaagggccatggaccccatggcaaatgttttgctggggcatgatgggcgttacggcaggcttaattagtcgccatcagtgggcacagaataaatacttgctctgtatttttgggtttgtctggggctttatttttgggtggattatgaatctgtggtattttgtcgcatacgtcaatccactgacgattaagacttttattgcagcctatgtcgcgagtttctattttgacttggcccatgctttatcaaatgttttttttattttcttcttttatcagtcgtggtaccgaatcatcagtcgctttaaagtgaagtatggtttgttggcgacggaagatgagctataaaattgagccctcaccaaagtggtggggctttttttaacggacatcatttcatacttgaaagttcacaatttggtcccaactgcttggtattctataaatatcagataagcatctcccaagtaagtgaatctgagcaagttaattttatgagacaattcctccctaaagaagtgtcttagcaacacccaatgagttatagtttaacggtagaaccaatcatctaaattgaaattccttccaagaaaatcaaaagcgattggctattaaaagcgaagcgtaaaatgaatgattgatgtgggttcaatccccgcaactcgatgactgttgtgttaaaaaagccgcaaccaatttggttgcggcttttttgcgtttagtagaccaatccctgtttaccagtagtatggccagttaacagtttatcagtaatcatttggagattagcgaccgttaagcctgtgtagtgggcggtggtgattggatgcagaatccgcgcatcgattagccgcgcaatttgttggagaatcgccccttgactagtggtttggaattgatagtccgttttagtgaacatgtactcaaatgaaaatgaggctgatttaggcttaagcggtgcgagatcaagtggatgcgtattgccaacaatcgtaccgacttgtccaaacggtttaatcagccgtgcgacctcttggagatagctttcaatatcataaaggaccgcgatggcatcaaaggtgttatccggaagactggctaagttgtctaagctgctaggtgaatgataatccagcgggtgatcaactccgtttgtttttagccagtcgaaatgagtgagactgcttgtggcagtgacggtgaatccggcccacttggcgagttgactgagaattgatccaaccccaccggcaccattgataatcaatagttgtttgccacgattggcattttgttcagcggtaaaaccaagcttttcaaaaagtaattcataggcggttaacgaaacaagcggtaagccggcaatctccgcggcactgattgtactaggcgcaagcgcacaaatcgcggccggaacacattgatagtgttggaaactgccatcgatctgggtactgccagcatagaagacaacatcgccaggttgaaagttggtcacagtggcgccgaccgcttgcacggtaccatacccgtcatagcctaaaatggttgtggtgctagctcgtcttttaaggtcgacagggttgacgctacttgccctgactttgatcagtagctcttcaggtttaggcgtagggatttcaccagacactgcgtgccaattatgttcggtatcaagttggatttggtgattagtggtcatgatgacgtcatcctttctgaataaaatggttagtctaagcctactgctaatcaccgcataatacaaaaaaagacgcccaattaagaacgtcttgagttcatttaaattgcttcaacagtaacttcttcagttggttcatctgcagaagttgtctgtaaaaattgatcgcctgcaagatctttgtagaatgccatataagttgcattcttatatggcgttaaccagaaatagccaatgccaagtgagaggccagctaaaatatcccaacctaagaagcttagttgtaagacgaaaaaccggaatttatgcccattcattaactcacgactcttagtgatacaatctaaaaagctaacgtcagcttgtggatcgttatctgttaagtccttgaagatataagaagcttgagaataagcgtagcctttaatgatccccggaataatgaataacaatgcccaaaggaatgtaaataagctagctaaaattcgaattagaaaagcgcccaagaaataacgttttgagaagacactgaaagctcctttgagtgaactaaaatcagcatctttcgaacggagccaatctaagaaagtaaaattaatcccaagtgtaatgagccccaaaatgaaacttggaatttgaccagcaaaactactaccagacgaatggcccgaaaaagattcattggcagccattgatgggtcggtgtttgcgaagatggcaatcatggccatcaagactgctccgacaataatcaccccaataattgatagcagagtggggatgatgttcaacgtaacggcctttccccaatgaccagcaaataatgacttaacttcttttttaagtgaagcgcgtgattgatactctctttccatgataattcctcccttactacgtagataaattatactattaattaatggctgaaatcaatttatttttaagtatctttgaaaggattgttggggattagttgttgaatgcactggtacatcaggtattctataaataatagcacatcataattaaatagtgtaaaatataaaattaactatttttgttaaggggatgtatagaatgaataagggtcgattagaagcatttagcgatgctgtcatcgcgattattgtcaccattatgatcttggaatttaaaacgccagaaacaccggaaattaaggcacttttggaaaatggtccctacttttttgcgtatatcattacgtacgttttcgtaggggttgcttggtataatcattactatatgttttcgctgacgaaacgaggaacaaagcgtatttattggctgaataatatttggttattatccatgtcatttttacccgttgcaacggcttggacggggcggttcatcaatgaacgcggtccggaatatttttactacgtggttcatctgatttggttattggcctacttcttcttgagtgatgcattggcgaacgccaatcgtgaagtcgcccctgagcggtatcaaaaaattaaagccatgccgatctatagcacgattactagaccttatttctgggtgattcaagtgattctattagtcgctatttatttctttccacccatcgaattaattttcgtaatggtcgaaatttatacgattgggaatcgtaccgacaaagaaagtgatcaattattcaatgattaaaaaaacaccgctagcctattaggttagcggtgttttttgggagatctagaatttaataacaactttcccggttgagtgattcgtagcacttagttgatgggctttgatcaagccatcagcagaaaatgggaagacagtatcgataattgatttgactttaccatcggccattaatgcggcaatctttttaagttgatcaccatctggcattaaccagatagctttgaaagtcatattggtatctttaatgatggccgcagtttcaggcgcttcaccaacgattgaaatttggcgacctgtttcaggattgaggacagcccatgcatcgacttgtccttgacccccgatagtgtcgataacgagatcgacattgtgggctttatcggccactttttcagttcgatagtcaatgatttcatcagcgccaagttcacggacaagatcgaagttcttcgcactagttgtggtgataacgtgggcgcccattgcttttgcgaattggatagcatatgaacctacgccacctgaaccagcttggaccaggacggtttcgcctggttgtaggtgaccgtggttaaagagtgcttgccaagcagtttcgccagctaatgggacggcagccgcttcttcaaaagtgacattggctggttttggtgcgattaagttgtcatcaacggcaacgtattcagcataagtaccacgatttgaagtggcaggtcgtgcgaaaacttcatcaccaacgtgccattctgttacggctgatccaacggcaacaacgaccccggaaaggtcccagccaagaacgattgggaattcccattggaacatgcttgtgagatgaccttcacgtaatttccagtcgagtgggttgattgctgtcgctttagattgaattaggacttggtgttcaccaattgtaggcatcggtaaagtaatcatttcaagttggttttcgtcaccatattgttggatggcaacagcgtgcattgtttctgacatatgaatagcctcattttcttattattagtaagtgtagtgtaccaatcaaatggttgttaagtcaattaacaggcttaaaaagtaaaagaaaagcacccaatttggttaattggatgctcagaaaataatgctgttaatcctcaaaggctaacctgtttgagtcagcactctgtatcaaacgtgctttttaaagctgcctcttgcgcttagccacgtacctgtaaacgatcgtctttggcgctcattcacggtacgattctaatgctcagaggcaaaccgctttaaacgcactttatatcaaacgtgcttctcaaacagccttttccggttaactacaaaacggacatcatggctgagacccgccataatgcccgtttttacgttaatcctaaaagtctaactcgtttgagtcagcactctatagttcttcttctgctatttttgctagtgttgtttttgatgggatgaagaatagggcaccagttgttggttcactgaagtcgagtaggtggtcataattgccggctggtttgccgacgaacatattggttaacatgcgttttgtcactgaccatgttcgagaatagccgataaagtaagtaccggtcattttttcgccagggtttgcgtatggaacgttcatgcgaacaatcttatgttccacaccgccttcgttatcttgtgagacaacgttgtgcgcgttggttggcttttcggcgtcagcaagttctaagtcagaaaactttttgcggccaattgttttttcttgttcttcagttgaagtatggttccagctgtccatggcatggatatatttctgtgcaaaagcgtatgaaccgttgatgaattctggatcttcatcgccgactaatgcgtatttagcagtttcatcgatagcgggattttccgtaccgtcaatgaagccgatgatcgcgcggccttcgaagtaacggaatccgtgtgtttcatcaatcgttgttgcgttatcagaaatgaattgcatcatttgatctaatacttcataacaaaccgccatttctttggcccgaatatggaagaaaagatcacctccggttgcgacggcatcatgtttagggcttggaattgccttgaagggttccaattcctttggttttggtgcgttagggaataagtaatcccaagcatccgagccaatcccgaaagccacgcgtaagtgggcatctgggtaacggatattcatgctattgatgatcgctggaatgcgcgctgctaattcggtaacagccgctttgtccgcctcggcatcttgccgattcaatttctgggtgacgaaaatgatgttctcgccagcatctttaaaaacgtcttgtgcatctgtgggtgtaattgccatgttcagaacctccaaataaaaatttaaagttagttatttataatcattattatctagctcagtgcaagcataccaaaaaacggttttttttaccagtcccaataattaaaaaaagacatataaattggtagtcatcctgaattctggataactaccaattttttattaatgctcagttgctgaacgcaaccaaacgcactctattcttaaacgtgcttttttaaacagcttcctgcgcttaaccaaatttgccaaatcgccgattgcatcggtaattcgtcaaatcctgttaatgctcagaagctacccgtttcaaacgtactttatttaatttctgctaatgtcttttcaagatgggctaggacacggtctttacctaacaattcgattgaatcaggtaatgatggaccatgcatttcgcgagtcgttgcaatccgaattggcatgtacaattgacggcctttaatcttcgtatctttttggatgcctttaatgatttgcataatccgtggtgctgtgaataatgttaaatctttcaagcgttcgctgaattccttcaaaacaacggatgctgtttcgttatttaattcttcaagcgcttcggcgtctaattgttcaggttcttcaaagaagacatctgacatttcaacgatttgagctgtgtagctcatttgatcttggtataacgcaatcaaatgacgggcccattcgatcattttgctatcaggattttcagcgattttacccgctttaatcaagctttctaacgaaagatccatgattttgtttggatctgattgtttaacgtattggttattcacccattcgagtttcttttgatcgaaactagctggtgatttgctcaaacgttttggatcaaattgtttgatgaattcttggcgattgaacaattcgctttcgccaactggtgaccaacctaatagggcgataaagttaaacatcgcttctggtaagtaacccaattcgcggtattgttcgataaattgaagcactgattcatcacgtttacttaacttcttacctgtttcagtattgatgatcaatgtcatgtggccaaagactggtggttcccaaccaaaggcttcgtagacagccaattgttttggcgtgttggcgatatgatcgtccccacgcaagacatgggtgatttccatcaagtgatcatcaacgacaacggcaaagttatatgttggcatcccatcgcgtttcatgatgacaaagtcgccacctaaacgatctgattcaaagctgatttcacctttaacaatgtcatcaaacttgtaaacgtgatccttaggaagacgtaaacgaacaactggttgtaagccttttgctttagcagcttcttggctagccttaatttcatcatcactcataccttcgtattcgtagatgtaacgtggtgcttcgccagctgctttttgggcttcccgttcttcagttaattcatcttctgttttgtatgattcgtaagctaatcccttagccactaactcttcaattaaaggcgtgtaaatttcgcgacgttctgattgacgataaggaccaaagtcaccaggcttatctggaccttcatcccaatccatacctagccacttcaaattatctaactgactgttttcaccgtcagcaatgtttcttttcgtgtcagtatcttcaatccgaatcacgaaagtccctttgttgtgacgtgcaaataaatagttaaacaatgctgtacgagcattcccgatgtgcaaatgacctgttggacttggcgcataccgcactcggattttattttttgccataaaaaaaacgcctctttctaaaattatacttgtctactagtttaccgttattatgcctaaaaataaaggctcagagaccactaatccacaaaaaaagaatctaggacaaaagtatgtttgtcccagacccttcttctgatagtagaattctatcatttaaacgtgctttttgaaccatcttcctgcgcttaaccaaatttgccaaatcgacgattacatcgtcaattcgtcaaatccagttaatgctcagaagataaccagttcaaacgcactcttccacttaaacgtgcttacactaactgcctcctgcgccttgctacatcagtcacatcaccggctttaccggcaatccgcctgattaggcaaatgcttaaaagcaaaccgttagtgacgcactctcaccgcattaacggagtggtgtccattgccattcttcaacttctggtaaatcagtaccttcattgcgaatgtattgattgtgtttagcaaccatgtcatccattgattgtgcgaattgaccagcttgatcaccaagtacgtcacctgcaacttctttagatagactgaaacgatccatttgattcaagacacgcatgtcgaatggtgttgtaatatcaccattttcacggtagccatgaacatgaaggttatggttgtgacggtcaaagaagatatcacgtactaagccttcgaaaccatggaatgcgaagaccactggtttgtcttttgtaaagtacatgtcgaattcttcatctgttaaaccacgagggtccactttaggtgaacgaagtttcaataaatcaacaacgttaatgaaacgaatcttcatgtcaggatattgtttgtgcaagattgagattgcagccaaactttcaagtgttggttctgtcccagcagctgcaatcacaacatctggttcagcatcttggtctgtacttgcccagtcaataatcttcaaaccattcttaactaagactgttgcttcgtcaattgagaaccattgttgacgtgggtgttttgaagcaaccactaaattgatcttttcttggctcttgaagacagtatccattgttgctaacaacgtgttagcatcagcaggtaagtattcacgaatgaattcaggtttcttttcagctaagtgtgttaagatacctggatcttgatgtgtgtaaccattgtgatcttgttggaaaacagttgatgtggcaatcacgttcaatgaaggatacttgttacgccatgcttgttcatcagccttacgtaaccacttgaagtgttgtgttaacattgaatccacaacgcgcaagaatgattcgtaacttgcaaagaaaccatgacgaccagttaggacataaccttctaaccaaccttcagcttgatgttctgataattgtgaatcaagaacacggccttctgttgccatgtattgatcgtttggttctttgattgattccatccattgacggtttgttgcttcaaaaatatggttcaaacggtttgacattgtttcatcagggccgaagattctgaagtttttattttgatcgttgtctttgatgatatcacgaacatattcgcctaaaataatcatgtcttgcgcaacgactttaccgtgttctgaattatccacagcataatcacggtaatctggtaagcgtaatggtttaggatcaatcccaccattggtgattgggttagcagccatccgttgatcgcctttaggtgcaatttctgcgatttcaggttttaattgacctgcttctgtaaacaattcttctggacggtatgatttcatccaatctactaatgcatcaacatgttgcatgtcagcactgtcaattggcactggaatttggtgcgcacggaatgaattttcgattggtacgccatcccatgtcttaggaccagtccaacccttaggtgcgcggaagacgatcattggccatactggacgagatgaatcgccgttttcacgcgcattcttttgaattgcttggattttttcgatggcttcatccattgcagcagcagttgctgggtgcatcttttcagggtcgtcgccttcaacaaagattggttcccaaccattgccttcgaagtatttcgttaattcttcatcactcttgcgtgaaagaattgttgggttagaaatcttgaaaccgtttaagttcaagattggtaagacagcaccatcattcttaggattgatgaatgtgcttgataaccatgatgcagctaatgggccagtttcagcttccccatcacccacaacaacagcagcaatcacgtctgggttatctaaaatcgcaccaacaccgtgtgataatgaataaccaagttcgccgccttcatggattgaaccaggtgtttcaggagccgcatgagaagcaacgccgcctgggaatgagaattgtttgaataatttcttcatcccttcaacatcttgagaaatttctggatagatttctgaatagctaccatctaaatatgagtttgagaccatcacttgaccaccgtgacctgggccttcaacgtagaacatgtttaagttatatttattaattgcacggtttaaatgagcatataggaagttttggcctgagattgtcccccagtgaccaattggttttaccttaacatcttttgcttccaaaggacgtttcaatagtgggttatcttttaagtataattgaccaactgagatataatttgcagcccgccaaaatgcgtcaactttagcaaggtattctttgcttgaataatctgtcattttaatagcacccctttttaattttaaaaaagttcctaatagctttactttaagttccagtcgcagcttttgcaactttgttgtttctgactactctcttatcatactaaactttttaaaaaagtcaaccatttttaatattgggtcgtaccaattttttgaatctaaaaatagcggccctattcgcgaccgctaaccgtaacgaatgtattatatttcatgtattggtagtgcaggcgcatcgttgaaaattcaaacggtgtcccatcgtctaagaagaaaatcccttccatgatgccaactggttccgtcggtttcaactttaagtgcgcttgatcatcatcagttgatggttccgcgaaaattgacaggaaagcgcgtgtgacttcttgatttttctcggtttccaagtagttaaagattgaactcgacacaattttttctgtcaattcgggcattaccttaatcggaatgaagcccgtttcaatcatgaatggttcatcatcaaacaaccggagacgcttgatttcgtaaacaaaatcatctggtttcaggaacaagtctcgttgcaattccgcgctcggcttgatgacttggaaatctaataatttaatccccggtgtccgattaccggctttaaaactgtcggtaacccctaggttagagccattgtaattaaaaaacgagccaccctttaaataaagtggattaataaaggttcctgaaccccgttttttgaaaatgatcccttgattagacataacgtttaacgcacgtttgaccgagctacgactcacttgatagtgttcagtcaacgtccgttcatcgggtaatttcatgctgggaaatgattctgcgttaatcgctttttttaagtccgcgataatattctgataaactaagtcggccatgctaaactcctttataaatcattttatctcaagcttattatacatgattcctaaaagtcgtctacaaacagactcgataaatgttcaattattaatgcaggccaataaaaaaagaggtgctgagacaatgtttattgcctcagcacctcgcgcgctccagatcagactatcttgcaaaaaatgcctcacagcgcctactttttatttaatgtgcttgaaattgggtatagtattctgctagtaattgggcaatccggttcccagtaatggcataattttcagcgggttggttagctaatgaaatccgcaagtagccatcatcagtccccattcctgccccatccatcacaacaacgccgtatttagctgcaagtttatcttcgaaatcaagatagctcacgtgcttttcgaaatagtcgtggaattcatgcccatactttctttcagcaaaatcatagatgttaaataccgcataatattcagcgttttctttagagtgatcacattccatgcccatcgattcccaaaaagcgttgtatcgcgcatcaaccattttcttggaagcttcgatgtatggatccttttcaccttcgtgaattaagctggtcaaactaaatagtgccatcaaaatttgttgtggtgttgataatcccgcggtgtggtacaacgcgatttcacgactgtcagccactgttcgatcaatgaatttcatcgcaagcggattaggcgccacaactgagtaccgtttttcaaaagctgccttaatcgctggttcttcagccgttcgcttagcaataatttcatcaaaaacattatcttggtgcactgctagtaagcctaaacgatgcccagttgccccataaagttttgaatacgaataaactaacatcgtatttcggggggcaattgagtaaattgtttggaaatcattcacaaaagtcccataaacatcatccgtaatgatgataatttctgggtttgcttcaacgacctctttaatcttagctaacgcgtgtttgctgaaagcccgcgaagtggggttcgttggattaaccacaaaaaaggctttgattgtcgggtccttcaattcttcaaacttggcgtccatcatttgccagttgtcatcttcaacggaactcacatcgaattgctttaatttatattcacttaattctgggatttgcaaataaggggtaaagattggggtattgatggcaatcgtgtcgccaggccgtaagatatggctgatcttcaattccttgaacaaataaaccattgcggctgttccgccctctgttgggaagacatccgtttgattagctaatttttcaccattatatagtgacacttcaaggtatttatttaggattttttccacattgattaaacttctcgaaggtactggatagtgattgccaatcgcaccgtcgacaaattcgtgaaccaaatcatcctgattgaggcccatgtgcttttcggtataatctaaaaaggctaatataaatcgatctgttttatgactggcatcaaggtaggcatgcagccgttgtgcaatccctgctttatcaacgtagcccgccatatctccatcagcctcgttaattttcttagcagattcttcgacgccaaattcgacaagcttattaaaagctaatcgcgcccgcgtattaatccagttagggtccccacgaccaacattaattggcgcattatgcattgtatttttttctgaattttctaagaacaaagcggcaacttcaaagtttgacatctcttttaatcgctcaatatctaatgagtgcatcgtttttccacctttttcaattacttgctacattcataatcgcatctaaaagcactttaacgctaattgacagtcaaaataacggctagcattgtaaatttattgtttgatttattatatcgtttttgtctcaaaaataaagcactcattcaaaaatcaaaccataaatgccacagcgattctccaacttcatattgcatcatttaccacaaacctgcaaccctgcggcgggattttttctaatgctgctaaaaaagcacatcatcgttcaacgatgatgtgctttttaaagttttaagcgacgttattccttattttctttgaagaacttcgcgaaatttttgcggtaattgtgcaacatccatttaatcaatagccagcgtttgagattcatatctttgctatattcaaaagtggtgccgtaacgtttttgtttgatgagtgccaatgccttgtctttttcggcattattgcgggcatatttcttaaagacatccactgaaacgcccaaccaaagtgcgggactgtcttcatctttattcgcccaaacaacaggttcatcttgcaagtcgtttgtcacgtaatcgcgcaccacccattgggctaagttatagccgttcaaggtaacaaagaaactactgcggcccatccgtaaattgatgtcgaataacttgtaggtgttatcgcgttcatcatatttcatatcgaggttggcataacccgtaaactcgatatcttcaaggaatttttggacttgttgataaatttgtgcgttgtattccggcaaaatcgccacgtaattcccaatagctgcgggtgctggatcttccaataatggatggcccagacacatcatcttcacgtgatgttgttggtcaacatagatgttcatcacgtgcatccgactgtcatccccaggaatgaagtcttgtaaaatcatgtctgattggtagccattttcatatacttttcgcatgatgtcttggaattcagcttcacttttaatcgtgaaagcttttttgcgcccttcaaaatgcacatcaagccattccacagaatccgccggttttaacgccactggatattggaaaggttgttccacctgattatcttcaaccatttgcttggtaatgatgtgcgtcttgggataaggtaagtcatatttgtcacagatttcatagaaggtttccttataagtcaacttttctagtaaatcgtgatcaatatatggacaaacaaagacatcttccaattccgctttatgttgtgaaattaagctcgcatagccatcaccacagccaatcaaaatgactgggccatcgctatcgcgatagatttcctttaattttagcatttcagtaatgaatccaggatcttcactgaagcctggaatcaattctaaatcgacgatttttgtaaaccgagttggtgctaattcctgacttgcgtaggccttaacaggttcatgatacatctcataaaacgaacgggccatcccgtaaacgttaaaatcgctccccaataaaatgggggtgaagtttttaccgtttgcttgcatgctgtcaccttctatatcaatatttatcgtagtataccagactgccgttcaatatacgtcagctcaggatgctctttgttaaaacttaattagtaattgctacttgttgtatagcccgtcgacaatattttggccgaccactgtcatcggatcaatcactttgtcgggatacaatggaaattccgactgtgcaacactcaattcggtacagcccaaaataaccgcgtcacaatcatagtcatttaacattgtatcgacaattttttgatacttgtcatggctgaatgtcccagtcgccttaatgtcatcataaatcaaactcatcgtggcatcttgcaatgtttggtcgggaacaacactttcaagaccaaaagcagcaattgctttttgataaataccggcttgtcgggttccggttgtgctgagaacaccgattttcttcaagccgggaattgtttgttgcatgtgtttgaccgtttcccgtggcatgtggataatgtcgaaatctgcggcagcttgtaattcgtcgtagaagtaatgggctgtgttacaggtcattaccatgaacttcggcgctaacaaattcatttggcgaatatcttttaacatcacgggcaacggattttcttggctgttgtcgaggatgtaggctgtgcgatctggaatttcagcgtggttgaacacgacgtaattcagataatcttgatccttcttagccggtgttaattcatcgattagatgtacgaaagtttcggttgccgccgtccccatgccgcctaaaatcgtaaacatttcttccatggcaattctcctttacttaattgacttcatttgatgctggttagtccttcttttgaggactcacttcgatacctaattcttctaattgttccggtgtcacttcactaggcgcattggtcattggttctgtggcccgggaatttttagggaaggcaatcacgtcacgaatattgtcgcgactagcgagcaacattgcgaaacgatccaaaccaatcgctaagccgcctgatggtgggaaaccgaatttcatggcatttaataagtggccgaaacgttcttgagccacttcaggggcaacccctaaaacagataacattttttcttggacttctggattaaaaatacggagtgaaccgccacctaattcataaccattcaagatgatatcgtatgaaattgcatgtgccttatgtggatcagtatccaacaatggaatatcttcatcacgtggacgcgtgaatggatggtgggctgcaatccatttgccaaagccttcatcatattcaaataatggccaatcaacaacccatgtaaatgcaaattggctcttatcaatcatatccatttctttagcgaagtgtgttcgtaagtaacctaagctatcacaaaccacttggaagttaccggcaacgattaaaattaaatcatcatccattaagttcaaacgttcaacaagcgcttcttggtaaggtaataagcctttagcagaagcccctgataatttatcaccagcgtatttcgcccacaacaatgacttagcgccgtaacgttcaatgtattgttgttgttcgtctaacgctttccgtgaatatttaggggcggcattattaacgacgattgcgcgcacatattggcctgcttcaacagcttcagagaatggcttgaagtcagaatcttgcacgatttctgtaatatcttgaatttgcatatcaaaacgaacatccggtttatctgaaccatacttgtccattgcatcttgccatttcaaacgtgggaatggtgtttgcacatcgatgcccttgacgtctttcataacttttttcaataaaccttctgtttcggtttgaatttcaacgtctgataagaacgttgtttcaacatcgatttgtgtaaattctggttggcgatccccacgtaaatcttcgtctctaaaacaacgggcaatttgatagtacttatcaaagccggctgacatcaataattgtttgaagagttgtggtgattgcggtaatgcgtagaaactacctggataaacccgtgaaggcaccaaataatcgcgtgcgccttcaggtgttgaactcgtcaagttcggtgtttcgatatttaaataaccattgttatcataatagctgtgaactgcacgagtaatcgcagcccgtgttttaatggcattttgcatttctggtcttctaagatccaaataacgatacttcaatttcaaatcttcagaagccgtattgttatctgaaatttcaaatgggagggtttcagctttgttcaagaccactaagtctttaacaatcacttcgattttccccgtcttcatgtctggattaatggccgcttcatcacgcgccatcactgttccttggacttcaacgacatattcactctttaatttacttgctacttggaaaatatctgcatctgtgtcttgattaaacaccaattgaacgatgccttcgcgatctcttaaatcaacgaaaattaagttcccaaaattccgttggctttgaacccaaccatgtaatacgacttcttggttgagaaattcttccccaactaatccacaatatgttgttcttgttctcatatttgccaatcctctctgaatctacattttataaaaaataaaaaaagcaccctcgtctttcgacaagggtgctttgcgcacggtaccacctttaatttcagctgttgataacgctatctgctagcgggatattcatccaagcctcaaaagctgtcaactggaatcaataagtaactttcaacggggttactctctctgtgattgatcgctaaaaccaagtactttatcgatggctacattttattataatgtccaaaatatatcacaaagccctttaaccgtcaagttttgcagttggattgagctagctggattcgaaccagcgcatgacaggatcaaaacctgttgccttaccgcttggccatagcccaataatgcggcaccaagattaagttggcgccgtaaattgattgaattgaaacgtgctttcattaactgctttctgcgttttgctacgtattgcaaacaatcagctgtgctgattattcacaacactagacaagtgttcaaaagcaacccgttaatgacacactctaaacgtgcttttgatgacaacaatttccgcttaatctaaaattcccaataatcctaaaaacccggattattgggaattttgtattaatgctcagttgttaaccgtcatcaaacgcactctaaacgtgctttggcagccatcttcttccggttagctacatcagtcaaatcaccgactttgtcggtaatctgcctgattaggctaatcctcagaagataaccgactgcctgcgcactctttaaattaccatacaaatagtccgactgttgctgctgaaagaagtgatactaagattcctgatagcaacatgtagccgacgtttttggcaatcatgtcgttcttttcacggtccacaaggcctttgaaggcgccgatgatcatgccgactgttgagaagttggcaaatgatgtcacgaagaccgttaagacagcttggtaatgtggtgcgaagctcccgattgaatgttggactttacccatgacaacgaattcgttggtcaccaacttcgtccccatgaattgtgcaaattcaaaagcgtggtgcacatcaagtcccattaaccatgcgaatgggaacatcacgattccaagtaaatgttcaagggtaatccaagggttcactaattgaagcaccttgtcgatcaaggcagccaacgcaacaaaggcgatgacgtttgccgtgataattaaaactaatttaccagcatttaagattgaatcacctaagaatgagaagaatggttcacgttccactttgccttcaaccatttcggttgcttcaacagctgcggaaccactcccacccattttagcaatcgtatcttcttcgggtgtgactttcactgggtttaaaatattggtgacaataatagcgttaataatgttgaccggaatcgccgttaaaataaattggcccggcatcatttgtgtatatgcgccgatgatggaagctgtcacacagctcattgacatcatcgcaagtgttaatgttcgttctgctttcatttgtttcaattgtaagcttgaaacagctaatgcttcggtattgcctaaaaacatcatttcaactgcaaagaatgattcaaactttggttgtcccgtaatcttagctaacccacggcctaaccatttaatcacccaaggcaagaccccgatatacgttaagatatcgaataatgggataatcatcaagattggtaataacacgctagcaacgaaatccatttgtttcacattgacccaacttggtagtgcaaaagcaatcccagtataggcaacttgcactaaccagttaaagccgtttgctgcacctaaaacaatatcccgcccgattgaaaaactcgttaaaaaccaagcaagcactaagttaatcactaacatgattaagacggagcgccaatcgatttctttctttttctttgagaacagaaagccgactccaataaaaatcagtaatccaacaacatttacaagcaaatacacgacacgccacatccttcatttgtctttttcgtaccgctttaaataataccgttcccccttgtaaatgtaaactattgttcaccccctaattgcataaataatcacttgttaaacgcaactaaattagtccacaaaaaaagcggtccccttttgcaaaggaccgcttttccattcatttttaatagcccgcattccactgatttgtagactgttgcgtttgccaagtattggtcgtgttactgtaatcgttgttaccactataagttgcactgttcgagtagccatagttactttgcgtcgtcgttgcagcactctttccaccattcatgacactttcagaataaaccgtaaactcttgatgattttcttcacctgtaaagttggtattcaaatcgttttgtttggtttctgcgttgttaatcgttgttttttctaatcccagtgacgttctcaagacatctgaaacgcgttggatttcttcattggttggaatctgatacgagctaccatcaatatcagcattacgtccagttaaaacatcagactcaattgatttagctgcctttcgataatttgcttgaatcgctaccatgtcatcaaaactgaggttagtggcaacactatctgacaaggagtctaagatagattcaaagttggtcaaagatttaagcgagactgcagaattaatcatcgacgtgataacttgtttttgccgtttttgacggccataatcgccttctggatcatcgtaacgcattcgtgagtagtctaaagcggcttttcctttcagatgcatcttgcccttagtaaactcgctcccgttccattcgaacgtaaatggtacgtcaacatcaacgccaccgacagcgtcaacaatcttcgataagccccccatgttaaccgtgacatagtaatcaattgggacatcgaacatcttttcaaccgtcgacatcgccatatcagaaccaccaacattataggcagcattaatcttctgcatgttaaattcatctgcgccttgtaactgcgctagcgtatcccgaggaatgctgaccaacttgacctgctctttatctggattgactgtcgccacaatcattgtatcggaatttcctttatcaacccggccctcagcaccagtatccactccgagtaataaaatagagaatggttttttatgtttaatcgttttagcggcttttttagtcgcatttggtttataaattttattcgctgcagacttcacttgattactgatgcgtaatgcatacgcgccgccaccgaagaggactagcgttagaatgagtatcaaaactttcatcgtgcgatgctttttaacttttttgtagtttgcttctcgagatccgaaaaatttagaattctgcataggtgtttcccttctattatgtatcataccggcattaataatgttatgttgctattatagcggaattatcatttcaaacaacgccttttaagaaaagttacacaattttaataattccttcaattgttgaacaacactttcctaagcgcttttatgctaaaatgtaagcaagtcttaattatggaggtttcatatgtcaactcaacaactccccatccgcgatgctgttccagaaaagctcacatgggacttaaccacgattttcaaaaatgatgcagcttttgaagtagcctttaagaaagttaaaacgcaattacccacactcaaaacacttgatcgtccgtttgaatcggctgatcaattagtcgctacaatcgaacaaatcttagccactttccgccagctcgaaacaatttacgtttatgctagcatgaaaaatgatcaggatactgctaacgcaacttatcaaggctatcaagcccaagtggacagcttagcggccgaagtttcagcagcagcggcctttttagagcctgcgattcttgctattccggctgggcaattagcagattggcttaccaagacgcctaatttagcagtttacagccatttcattcaaaccattaccgatagtcgagaccatgtcttatctgggcaagaagaagccttgttagctgctgccggagatatcttcagtgctgctagtcaaaccttcagcgtcttagacaactcggatttacaattcccagaagtgactgacgaaaacggacaaacgttgcagctttcagatggggtctacagccaacttttacaatcaaccaaccgatcagtccgccaagcagccttcgaagcactttacaaaacttatggtcaattcaaaaatacatttgcgacgacgcttgccactgaaatcaaaggtcataattacttagctcaagtccatcactacgatagtgcacgccaagcagcgctagcacccaaagcaattccagaagccgtctatacaaccttggttgatcaagtgaaccaacacttaccacttttacatcgctatactgaattacgcaaaaagcaacttaatttatctgaattacacatgtttgatctctacacaccacttctaggaaaacccgcattaacctacacttatgagcaggcgcaagcaactgccaaagaagcattgtcgatcctaggacccgattatgccaaacaagttgcccatatttttgatgaccgcttaatcgatgtttgtgaaaaccaagggaaacggagtggcgcctattctggcggcgcttatgacaccaatcccttcattttattaaactggcaagatgatttaaacaacttatacacattggtccatgaaacggggcatagtgtccacagcgccttcacccgtcagacccaagattatgtttatggcgactatccaattttcgtggccgaaattgcgtcaacaaccaatgaaaatctcttaacggaatatttattgcaaacacagtctgatcctaaggtccaggcctatctattgaactactatttggatggttttaaaggcactgttttccgtcaaacgcaattcgctgagttcgaacatgcgatgcatgctgccgctgccaatggtcagccactaactgccgagttcatgtcacaacaatatgcggacattaatagccgctactacggacctgccgtcgttaacgatccacagatcgcccttgaatggactcggattccacatttctatatgaactattatgtttaccaatacgcaaccggctttgctgctgcaacgactctcactaacggcattagcaccaaacagcccggtgctctcgatcactatttagactacctaaaagctgggagctccgcctacccaattgaaattatgcaacaagccggcgtcgatatgacgagtgccgactatctcgaacgcgcttttgcagttttcgaagaacgtctggatcaactcgaagccctacttgctaacctaaattaagcctcatgaaaaaacgccctcaatgattgaggacgtttttttaacggctaattcgtcgatgatataacaatgcaataaagtaaaagccaaactcaatcgtggcgatgaagaaggtcactggccagttcgttagataaccaagccataaaccgagccaaacccctaataacgctgcggcaaccgagattgccaacatcccgggtacgctcttcgctaaatatttagcaatgaacgccggaatcgtaactaagatgaatactagtaatgaccccacaatctgagcagcaatgctgacactgacggctaataaaattaagaaataaatcgatagtaagttggtctttaaaccttgtgcttgagcgccaatcggatcatatgaatcaaataccaagtaccggtaaaagatcaacagcccaatcataattgccccagataagatgattaattgataaacatctgctaagctaatgccaataatcgaaccaaataaaatattggtagcataactagcatttcggtttgaaagggataaaaagagaatccccaaaccgacaaacagacttgaaatcgcactaatcgacgcttctcgccgtgattctttggcactcatctgaccaatcgtgattgaactgagtaacgtgaacaataacatcccattcaatggtgcaattcccatgaaaaccccaaatgaggctccggcaaatccaatttcagatagggtatgcgctagaaatgacatgttccgcgcaacaacaaataccccgattaaaccgcaggtaattgcgataaaagtactggcgacaaaggcatgccgcataaaatcaaaagttaacactcgcttatcctccgctttaatctaattccaaattgggatccaactgactcattggtccggcttcatattgacctcgttttaaaaataggtattgatccgtgtatttccgggccaattctaaatcgtgggtcacaaaaataaccgtcaaaccatgttcccggttcaactctgcaaccaaggccatcacttcttctttagtttcaatatccaaactcgctgtcgattcgtctaaaatcaacaagtctggtttactgattaatgcttgggctaaatacgctttttgcttttcaccaccagaagcattccccacggtcgtcttttgcaacgcggttagatgggtctgttctaaaatttgatcaagcgcttggcgttccttgcgcgatttccacggtaagtggctatcaagttgattcaaactcacaaaactacgaatggacaacggatattcagcttctaaatttctaaactgtggcacataaccgatgtttagcttttgcttatccgggttaaaaacgagttgtccttctgtcggttgtaaattaccgattaataggcgcaccaaagttgttttgccaaccccgtttggaccgattaaactcgtcatgctaccacgtttgatcgtaaaactgagatcttttagtacttgtcgattactaaaggcaagccctaaatgttgtgcattcactaattctgtcattttgaatcctgagcctttctaactgcatcaaattgctgttgcatccatgttaaatatgtttttttagcgggtagtgtttcagttacttgtacaactggcaccccttctttatccgctagttcgtgcatttgtttaataatgggactttcttcttgcttattaatcactaaaaaggcaatctgatgggttttaattaaatcccgcatcgttgtaatatcttttggtgatggatcggtcccatcttcaattgctttggcaaagtgttggttagcgactttgtaacccatttcagccaatgcatagtcaaaaacgggttcactaacagccacttgttttcctttggcctgcgcctttagttgttggagttgtgcgtctaacgaagctaactttttaagatacgccgcaccattttgctgatacgttgccttatgtttcggatcgcgcttgctaaattcagtcactaatcgcttggtcaatgttggcatcgtctttaaatcataccataaatgttcgttagcgccattagattgtttcattaattgactgactgtcaacacagtttggtcatctggttgggcactcttaacgactttgtttaaccagctgtcgtaaccaagcccgttttgaatcacaatatccgccttagccacgagtttagcatcattggttgttgcttcgtatgaatgtggatctagactgggactattgataatcgacgtcacgtgaccttgattacctaaaaccgcttgtgcagcttcaccataaaaatcgagtgacgatacaacttgaatcccactcgccttttttgtactctgaccacaaccagccactaatagcattagcagtaagattcccgccatgattcccaaaccttttttacgcatctttttctcctcttttctaaatcgtaattattacgttttactaaaaatattttacacgagtctcactaattgtcaatcatttttctgaaaacacttaaaaagggattgggacaaagattgcttttgccctaaccccttttttgaattgttgaactttaaacgtgttctgtaagtcattctcctccggttaaccctgagtcgcaaacaattactgcgtaattattcacgccctgtgttaatcctcggagcatcgacttaagccacactctttaattaccagatttgttccactgcacctgttgcttggacaacaaaataacctgcccgtggttgatcttcgtttggtacgtaaatattaatgagatagccttgttgcccaccgcgtgtgattaagccattattcaaatacgatgcggtttgaccaaattgtgagccaacttgttgaaccaccaatttaatcgcttggttgccatctacggcagttgtttgttgtggtgtcgtggtagtcgttgttggtgcactgctgctagattggctcgcagattgactactgctacttgccgttgtagcagttgatgatgattcagcaacacttgcagttgatgaacttccttgtggggactctacttcagttgaagatgccatcgccgctttggagctcgcttttaattggcttgcactacttgaaagttcactttcgcgttttgcaacgctactttcacgtgctttaagactagccgtggttgaactttgcttggcatcagcatcttgatttgccgtactactttgaccacaagcccctaataatagtagtcctgataccaaaactgtactaactgtaaccatctttttcataataccccctccaactcctattgattcatctttattctacgagacccacctcagaatagcaattaaatccacatctgatttaaaaatctttaagaaacacgctgattagcttaacttagcagccacttgcttggcaatcaccatatcagttgggtatggtgtatcgaccccgcgtactttctgataagcatcggcccctttagccgctaagacaacaatttcgcccggtttactttccgtaatcacctgttcaatcgctgttgcacgatcaatttcgatggtggttgtcaccttatcctggtcaatccctgccaaaatttcagcggcaatggctgctggatcttcaaatcccggatcatcagtcgtcaaaatggcccgatctgcatattcattaaggacctgtgcaaacccagcacgtctagaaacacctttatcgccaggactaccgacaacaactagtaggcgtggttgattgtattccttttgcaagaagctcaagagcgccttcatgctggcataattatgcgcgtaatcaacatatacttgaccatgtcctggaacggctaaggtttccatccgtcctggaatctgcaagtcgcgaattccttgttgagctgcgattaaatccgcccctgccaaaccagcaccaatcactgcagctgtcgcgttgctttcattgaaatccccaattaaacgcagttggtaatcaccagaaacaccaagttgaatggctcgttcagaagccgcggtaactttaaaccgactttctgctaagcccgtttctagattttcaaagcggaaatcaaccgccacgggaattgtaggttgataatccgtttcggcaaataagtaaattgattccggagcagtcgtcgtagttgctgcagcatacacatccgcaaaatattgtgtttgcgcgttaatcacacagtgtcgtgagttgaccaataattgtaatttgcagtgtaagtaatcttcgaaattaggatgttcatttggtccgacgtgatcaggtgaaatgtttaggaaaaagccaacatcgaacgttaagccgtacactcggtttttcttatacgcctgtgacgaaacttccatcactaagtgcgtcatcccgttttcaactgctttgcgcatgtcgcggaataaatctaaactttctggtgtcgttaaatccgatttgaagcgatcctctggtttaggccctaagacacgatcaattgttgaaaataatgctgttttttgacgggtcgccgcttgtaaaatcgattgagtaaagtaggccgcagttgtcttgcctttggtcccggtgtaagccacgataaataaatcatcttgtgggtaatcataaaaagccgctgataaaaccgccatcgctttttggacgttcgtgacgattaaggcgttcatcccgttgccttcaacaatcgcttgttcggcaacatatgttacggcccctaattcttttgcatttgttaaatagacgggacgaaaattccctttacagaaaaagagcgtatcctcagttacctgccgtgaatcatacgcgatgccggtcatatttaaagtcgggtcaccattaagcgccacacttttcaataaatgatgctcttttagaattaacgtacatgcatctaatgttaaagccattttcgtcctcctcaaaatccttgtgaatggttttaattatagcacgatttaatcatgctgcgcttgaaacggcttataatcgtagccataaaaaaacgcgccaccgttaagtgtcgcgtttcaattccaactaaaataggttcgtgaaaaattctttgatcccttcaccgattaaaacaaataaattggctttggggtccgccgttttagtgcgtaattgtgattgtggcgcttgtccgatataccgcgtagtgacaccgttcaattgtggcatcacttgaccaatttgcacattctttttaataggtgcttccaattggcgttttgcaccacctttgactgcttggtaatgccagtcaatgttggctgctgtggttccttttggcacccacattgaaatagctttgttcgtaatcaattgcactgtcttttggcgaccatatttaaccgtcgctgtcttataaggtgcgagactctgattggcttgtgccaattgtttttgttcccaaccatcgaagacatattgcattaacttgttagtttcaatgaaccgccggccagtatcttcaccattggcatgcatcaccactgttagaatccgttgcccatctttcgtcgcagttccggtaaaacaatcgcccgctttgtccgttgtcccggtttttaaaccatcgaccacgtagtcttgcggtgcattattttcgccaggtaacattaagttccacgttgacatggccgtttcatcacttgtttgggcgccaaatgtaaaatgcgcttgcttggttgtttcgagaatttcaggataatcagccaacaacttttgcgctacgagtgcgacatctgccgcactcatttcattttcagcatcagccggactgcctggataaacttcagcgccgaggaattcattgttcaagccggacactgaataaagttgtgcgtcttgaatgccccaatccgccactttttgccgcattaaatcgacaaaatccttttgtgaaccggccacttggttggcgagcatcatggctgcatcattcgccgaagcgaccatcatggcttggaaaagtgccttgacggtatattgtccgtccgcttgtagaggcacattcgttaaatccttattttgactcaattgataaatgaggtcatcgggcttcaccgtttgttcccacgttaacttaccttgcttaatttgcgctaacacgatgtaggctgtaatcatcttcgtcatcgaagcgattggcaacgcctgatccgcattttgttcgtataagacttgtccagttgctgggtcgagcgcaattgctgcactcgcatcgatttgaggggtggtcggcaaactcaccggcgtacttgccgctgcaactttggtagtctgggcactcaaaagaccgccaacgggtgcaattgccaataggccgaccattacatattgtactaattttttaaacacaacattactccttaactgattttgcgccagcagtttgaggatcaatccgccgacctaacttcaaaggtaagtgtatcacaaaactggttaattctggcgtcgaatcagcataaatataaccgccatgtaacgcgacaatactttgggtaattgctaacccaagtccagtgccacctgtttcttgtgaacgcgatgcttcaacgcgataaaagcggtcaaagagttggttcaatgaatcacttggaatttgttgaccatcatttgacactttaataatcgcctcttgaccgattttttcagccgccaacgtaatttgtttgccacccttgccatatttcaaagcattagcaattaaattattgaagactcgaccaagcttttcagtatcggcttccatcatcagtggtgcaggattacaagttacattaatctgcatccccttcttattcgcttctaactcaaaactggccgctaattgatctaacatctgctccatatcaaacgttgtcttggtaatgggagtcgatgtttgccgcaccttcgtgtattcaaataaatcctcgactaaaaccttcatttgttgcgccttcacgaaagcagtatgcgtatatttggttagttcttccttggtttgatactgattatcttcaattaaaccaagatatccgatgattgaagtcagcggcgtccgcaaatcatgactgacattggtaatcaattcgtccttactcttttcaatcttgcgttcttcttccattgaacgcacagtactatcaaccagcgtgttcacactatcgatcacgcgttgcaaatcacggttgacacgcaaattaatccggtggtccaaatgaccatcggcaatgtaatgcaactcaccaatcacgtgccacatctgcatttgatggtaacgccgaataagccgccaatagacgactaacacatcggcaacccccatcaagatgacaaaccaattttgccaactccaaatatgccattcattcggaccaattgtaatggcgtttttaatcatccatacgccgccgcttagttgcggattattcacaatcgcctgttgtaacagcaccatgattgataaatttaatagtaataacaaaataaccgtgatgataccctcggcaaagagttcgctcttttccttagcggttagtgccactttttgcaggttcttttctccttgatagtcagccattaaacttctaccttatacccaacaccccagacggtttcaatcactttttcaccatcggttgcttcttcaattttgtcgcgcaaatgacttacatggaccatgaccgtcttggcagagacgatactttcttgtttccagacccgttcaaaaatatcgtccgctgaaaagacccggttggggtgactggcaagtaagtataaaatcccaaattcaagtgcggtgagttggatttgcttgttattaatcgtcgtcacttcatgtgagtcgcgcttaatgataagcggaccaacttctaagacatccggcacttcgttggccacttgttgttggctccgccgtaacaatgacttcacccgcgccatcacttctaatggattgaatggttttgaaacgtagtcatctgcaccggttaggaggccttgaatcttgtccatatcagttgtcttggcagacaccacaataatgggcacttgtgaatccttacggaccgccttaatgacttcgataccactcatattcggcatcataatatccaagatcatcaaatcaatatcgggattcgtggcaattttagtcagggcttctttacccgtgaaggcttgaatgggttcgtaaccttcgtttttaacataaatacttaataattcaacaatttctttatcatcgtctacaattagaattttcataatcgttacctcgtttaatttaacatcattttgcatgattcgctttcattgtaacaaactatcttctacttagagttaaagaattctttaaatcctccccatcatttaaccacaaaaaaaggatttaagtcgtgcaaaacgctcgacttaaaccctgatagaaatgatttgaattaacgtgctgaatagttaggtgcttctttggtaatttgcacatcatgtggatgtgattctgtcaaaccagcatttgagatttggacaaattgtgcattatcttgtaggtcctgtaaattagcagcaccaacgtagcccatccctgaacgtaagccaccaagtaattggtaaattacatcgccgagtgcgcctttggcagccacacgaccttcgatgccttctgggactaacttgttggcttcattcacaccactttggaagtaacggtctgatgaaccatgcgacatagcagccaagctgcccatcccacggtatgttttgaaacgacgtccttgatagatttcaaattcgccaggtgcttcgtcagtcccagctaacatactaccaagcatcacaacgtttccaccggctgcaagagctttaacgatgtccccagaatatttaatcccaccatcagcaatgatggttttgccatattcgcgggcaacactggcagcatcgtagatggctgttaattgtggtacaccgacaccagccacaatccgagttgtacagattgaaccagggccaatccccactttaacgacatcaaccccagcatcatacaaggcttttgtgccttctgcagttgcgacattcccagcaatcaaggttgcttcagggaagcgttcgcgaatttcactaatcttacgtaacacaccagctgaatgaccatgcgcagtatcgataatgatcgcatcagcccctgctttcaataaggctgcagcccgttcaaaagtatcgcttgtgacgccaacagcggcagcaactaataagcgaccatattgatccttagccgcattcgggaattcttgcactttttcaatatccttaattgtgattaatccggctaagcgaccgtcatcaccaactaaaggtaacttttcaattctgttttgttggaggatttgttcagcttcttctaaagaagtgccgacaggtgcggttacaagtgcttcgtgcgtcatcacggttccgatttcagcagagaaatcagagataaaacgtaaatcacggttcgtaataatgccgactaattttagatcatcgagatttgaaacgattgggacaccactaatacgatatttacgcatcaaatcttcagcagcactaacgggtttatccgctgttaaataaaatggatcaataataacgccattttctgaacgtttaaccttcaagacttcatctgcttgacgttcaatactcatattcttatgaatcacgcctaaaccaccttgacgcgccatagcgattgccatgggtgcttccgtaacggtatccatgctagcactcataattggtgtgtttaacttgatattctttgcaagttgcacccctaaatcgacttcgttggggagtacatgactctccgcaggtattaataaaacatcatcgaacgtaaaccctttttttgtaaactttgattcccatgcagacataatcttcctccaatttgtgaactaaattaaccgccgacccatcgattgttcgtattatctttaatcgataaccagtttaaaatttgataaaatattagcagatttttctgcaaacgtcaataaactcttattgaaaattcattttcatcaatatcgtgtacgaatgaatcacgaacatttaaaataagggtgcacaccacccagcttcgttatacaatagaaataactgattataaaggatggattggcatgcaagaacaacaacgggttctagatttaacacgaagttataacctacgcgaattaggcggttaccaaacggttgatggcaagtccgttaaatggcacaaattattacgttcaggtagtttgaacgcgctaaccgcaactgatattgaggatctcttaaattacggtgttgcttacgatgtcgatttccgttcacgtcatgaaatcaaggtcgcccccgacccatttgatgacaaccaactaacctaccatcgtctttcggtatttccattcactgaccaagccgatacccctaaaaagccagccaaaaaaggcctaatgcggctttttggtaaaaaagaagctgctactcccgaacgatcaagtatggaccggatgtaccaacaattggtcaccgactcccatgctcaagcagcttatcgcgatttatttaccgtactattaaataatcacgatacaaacggtgcagtcctttaccattgctcagccggtaaagatcgcaccggtgtcgcaacttttttaattctaagtgctctcggcgtcgactggaaaacaatcgttgccgactatgtcctctcaaatgaggtcctaggactcagctcagcaaccccaacccgaatttcaagtaacgatagccaggtcgcttcaatgaacgctaagagcattacacaggctaatctagaacttgtccgcgacacggttaatcaagaatacggcaacatcgaaaactacctatcaaaggcaatggccctcaaaccagaagaaatcaaacaattaaaagaggactacttagaatagcgtgcgactgcaaatggttgtccgctgaggattagcctaaaaaggcgaacacaagcaattgtgttcgcctttttgaatgatcttttaatgactcttaatataatttttgccatccgctgctggtgcgacggccttgcccaagaaaatcaccagaataataatcgtaatcgcgtatggtgcaatctggaaccagacactattcacaccggccagtattgggatgtagccgccgataatcggcaaactttgtgcgagtccgaagaaaatcgatgcacctgtcgcgccaattggatgccacttaccaaaaatcatcgccgccaatgccatgaagccctgacctgaaatcgtcgctgcgctgaagtttaacgtaatcgactgcgccatcaccgcgccaccaatgccgcctaacaaaccagacaacatgaccccgatataccggtaacgactcacattgatgcccagtgtatcggctgccgctggattttcaccgactgaccgcaagcgcagcccaaatcgcgttttatacagcacataccaactgataatgccgaccaaaaccgcagcgtaagccactaacgacgtcttcgtaaataaaatggggccaatcactggaatttgggccaagccggggaatgtgaagttaccgatgctttgattaatcaccggcgtttgccccttaccgctatacagcacacgggttaagaagacacacaatgcaggcgccaataggtttaacaccgtcccactaataatgtgattagcgcgcaatgttacggtcgctaaagcatgtaataaggagaacagtgcaccaaacagtccaccaaccaataaggcaatccacggcgtcaatccgccaaaaaccgtactaaattgaagggtaaagacggcactgctgaaagccccaacaatcataatcccttctaaaccaacattaatcacaccgctatgctctgaaaaagcaccacccaaggctgtaaaaatcaatggcgccgcgtaaactaacgtggtcgcacaaatcgtcattaaaatcattgtgattgtcattatttttcaagcctctctttcatcaacgcgtgttttttcagtaagcggtgattgagtaattgttcaaataagaagcgcacacccacgaagaagataatcgatgcaatcacgatattgacgatttctgtcggagttgttgagtagacggaaatgcttaagccaccaatctgtaaagcagagaataaaatcgccgcaaagataatcccgattggatgcccattcgctaataacgcgaccgccattccattaaagccgatatctggtaaggcatttgaaacggaaatattttgataattccctagaccatcgacagcccccgctaacccagctagtagtccagataatagcattgcccacataatcgtttgtttcgtattcatccccgcgtaacgtgcagcttgttcgttcaatccaactgccttaatttcaaatccagtcttcgaccgtttcaaataccaccacatcacaatcaccaagactaacgcgatgaaaaagccccagtgaaacgttgagtgattggtaatctgttccaaaaaaggggtccgcaagcttgctttagggacaatgttggccgatgagtcgctgtcttttggcgccaaccaacgtttaatcgcaaaattgacgaaatacaatgcgatgtagttcaacatgatggttgtgatcacttcactggtcccaaagtatgcccgtaaaaaaccggccaaccaagaccaaaagccaccgagcagcatccccgctaaaatcgcgccaagaatcaagagaatccccggtaaatttttaaagtggagtgcaaagacaatcgcgccaaaccagcccactaatagctgacccgacccaccaatattgaaaaagccggctttgctcgcaattgaaaagccaagggctgtcaaaattaacggagtcgcattgcgtaatgtctcgccaatcgaatagatatctccgaatgcgccattaaagaggttactgtaattttgaataggcgaatatccaaaaaccaacatcacaactccgcccactaacagtcccgccacaacggataggattgcaatgattaatcctgaagattgttgtttattcattcgtctcgccctcctactggttgttgcccggccattaataatccgagcgtctgactcgttgtggtttgtggatcaacttcaccaacaatttgaccggcgtgcattacaagtactcggtcagctaactttaaaatttcatctaattcaaaactaacaagtaaaatcccacagccttggttccgttgttcaatcaagctctgatgaatatattcaatcgcacctacatcaacaccgcgggtcggattggcagcaatcaagacttttggttgtttggcgatttcgcgcgcaaccaccactttttgctgattgccacctgaaagttctccggcaagcgtttgttcagattgcgtccgaatgtcgaatcgtttaatcagtttctgcgccgtttgattgatcacccgataattaagccagcctagatgactatacggttgatggtaataatccttcagcgctaaattttcagcaatcgacagtggcaaaatcaaaccgatattctggcgatcttctggaatgcaccctaagccttgttcactaatttggcgtggtgtccgtttcaataatgactgacctcctaattcaatttttccagactgcggttttaattgtccggttaaaacctgaattaactcactctgcccgttgccatcaatcccagcaattccaacaatttctcccgcatgcacggtcaatcccagatcatctagaacagtgcgtttagcaacacgagcagcgacatgttccaccgatagcatcacagcgccttgattagccattttcggtgtgggggcttgttgcggacggccaaccatcatttccgctaattttgtcggatccgtttgtgcgactagtaccgtatcaatcacacgtccggcacgaatcacgacgcaccgatcagcaacttgtttaatttcctttagtttatgcgtgataaaaatcaacgacttcccttccgcctttaacttctcaaaaatggcaagcaaggcttgaatttcattcggtgtcaaagctgcagtcggttcatcaaaaatcaatgtcgttgcttctcggtaaagcgccttgataatctcaacccgctgttgcatcccgaccgaaatatcagcgatttttcgatcaaggtcgagcgccagttggtatttatcgactaaagccgtgaccttttgccgcgccgttgcatagtcaatccgtccctgtttagttggttcgtcacccaggataatgttttctaagaccgtaaaagccggaattaacatgaaatgttggtgtaccatcccaatcccgagggcttttgcatgtcgagggccatttaaggtcactgcttgtccgttcaccagtaattgccccgcagtcggctttaattgtccggtcaaaacacccatcagggttgatttccccgcaccattttcaccaagcaaggcaaggatttcaccctgttgcaaggttaatgaaatatcatcattggcggtaaaggcgccgaaccgttttgtaatgtgctgcatttctatcacagtttttgccatttttacgctccattcattaagcatacaaaaaggatggctgataactgctgccatcctttagcattcaatagtcgttattctgcagcaactttaatggtgcctgcttcaattttttgttgatattctttgactgcttgccatgtttcaggggaagcattgtcgttcactaaggcaacgcctttgtctttcaaatcatatgtgacggttttgccaccagggaatttatcattcttagcttggttagcaagatcttccactgctgtgccaacttgtttaacggcagatgctaatgtgacgttgccaccatcatatttcccatcggctttttgatcttgatcaacaccaatcacccagactttttgaccacccttagaaatgttcttagcagcggtaaagacgccagcgccagtgccaccagcagcgtgataaataacatccgcgccgttgttgtacatcgcggttgccaatgattggccgacatcggctttcgtaaatgaaccagcatatttcacatcaacggtgattgctgggttaacggctttcaccccttgtttaaaaccagcttcgaatgttttcacgacggcactatcaattccaccgacaaagccgactttattcgtcttagtagttttcgcagcggcaaccccggctaggaatgatgattgttctgttttaaaattgacggacgcgacgtttttccgattcttaacgtttgaatcgatgattgcaaagttaacatttggattattctttgcagattggctgaccgcgttatctaacttatagccaatcgcaaaaatcgtttggtattttgccttgattaacttattaatgttcgggaaaaagtccgcatcagaactcgattgtgcgtaattgtaaccattgaccccttttttaagatcatgactagcaccccatttttccaaaccttcccaggcagattggttaaaagatttatcatcaatcccaccaccatcagtgactaaagcggctgtgtgcgttgctttctttgatgctgtcttttgactcccgcacccggctaacacgccacctaatacaaggactgtcgagaaaagtacgaccaaactttttttcatgaaataagcctccgtcaataaatttgataatttattataaacacgttatcgacataaaatcaatacattgatttcattttataaaatattgttcgtttatattgtatttgttgctaagaaatatagataatgctaatattaattgataactaacgaacaatcaggaggcgaaccatgcaaacacaagtctattttaatcacgatggcggtgttgatgatttgatttcattaactctgctcctacaaatgccgacaatcaaactacttggcgtcggcgtaattggcgctgattcatatgtcgaaccagccgttagcgcgagtcgtaaaatcattgatacgttttcagatcaatcagcgcggttagctgtggccgcttctgactcacgcgcagtccatccttttccaaaagaatggcgaactgacgcttactcagtcgatgcacttcccgtgctcaatgaacgtggcaccgttcaaacgcctctgagtcctgaagccgcacatctcgatctaatcactaaactcaatcaagcaaccgaacccgtcacattgctctttaccggcccattaactgatttggcacgcgcactcgccatcaatccaagcatcgaatataaaatcgctaaacttctttggatgggcggttcttttcttgaacaaggcaacgttgctgaacccgattctgatggtactgctgaatggaatgccttctgggatcccgaagcagtgaaaactgtcttcgatacacaaatccctattgaattagtcgggctcgaaagtacgaataatgttcccttaacgccggcgattcgccaacgttgggctagtaaacgtgccaatgccatgatggactttatcggcacctgttacgcctttgttcctcaactggtccatttcaaaactaattcaacttattatttatgggacgttttaacaacttgttaccttcttgatccaacaatcgttaaaacaaaagccattgtatgtgatgtcattccaaacggaattgccggcgggcgcacgttcttaactaaaaacggacgtccggctaaactcgtctacgacgttgatgcagctggattttttgatctaattgaaaccatcataaaagcagactaacgcaaaaaggagcaccgacttatcagtcagtgctccttttttgaacgtgctttcatcaacagcttcctgtgctttgctacacttagcaaagcggtgcttgcagcgccaattcgctaagttaggcaaatgctcagaagctacccgttgatgacgcactccttttttgaacgtgcttgctaaactaggggaacaactttgtaaaggggctgtttgaatgacgactgatttcaatcaagaacaagcgcatctatccactgtttatcaacaattaaccaccactttgacggccatcaatgatgcccaatcgcaaaaccagaaaaacggcaacaccatcaaagcgcagatcaccggtgaagccaaactcaatttcgattcatacgctgataatcttgatacattcgctgctttagaaagtatcaacaaggaaatcgatatgctcaacctgaaaaccgattcgctcgttgcacgtcatgatgagaccttacggctgttagagcaaccctactttgcaaaaatcacgctgacttttcctgaggaaatagacgccgaagatttttaccttggttcagctagcttcacaaaccaagccggcgatcctgtgatttacgattggcgttcacctatcgccgatgtttattaccagcaaacattcggccccaccagttatcaagctaacggtcgcgccattgcggtcaatctcgaccgacggcgccagttccaaattcaagctgatcagctaatcgatttctttgatacgcagattgccatcgaagatcccttgttattagccactttaaaagaagccaaaacaacgcaaatgagcgccattaccgcgacgattcaaaaggaacaaaacgcgattattcggcaacaaacgactgaccatttactcatcgatgggattgcgggcagtggtaaaacatcggtcatttttcaacgcatcgcctatttcaagactatatcgcccaagttttaccagacttaggtgaacaaacaccagtcaacttaaccctacaacaactattggcgcaattgttaccttctgatctagccgcactccccatcgctgatcaaccagctactttgaccatcacacaattaacgttgcaggcgagcgatttccaatctttaagccctggtttaccgctgacgattgatgccgcaacaagctaccaattcttcttaaaaacaccggtggataccccgcttgataaacgaatacaagcaactcagcaacaactcacaagttgtctacaggaaagcatcacaaatgaagcccaatcagcagatgctttaactcaacttgaaagcctcactgaaaccgagcaacagcgcttattcgaccgcttaattcgcgaagatgaaccactagcaccgctagcacgcaaaatgattcgtcatgattaccaagacttagctgatcagctaagcggttatcaatggcttgcttttgatcaaataattgcccgtcaaacaccgattgatgctgttattgcagctcagatttatgcttatttaacgcatcacgtcttcccaaacgttaagcaggtctttatcgatgaagtgcaggactatcacgcaagcacgttatctctttttaaacaacttttccccaaagcacagttcacggttttcggtgatcagcatcaaagtatcaccccgcataaagtacaattcgaacaattacccaccatttttccacaactacaaactgcggcactgcgcacaagttaccgctcatccggtgcaataacgacgttatttagtcaactattcaccgatttaacagatgtccatgccgttcaaccagcaggcaagcggccaacgacgatttgtgcgactgattttaacgactacctcacccaaatccaagctcagattgaccaactaccaactgaccaaaccttagccatcatcacgcctgctggtgactttgacgagcggttaactggcctcaaaaatgtccaccacttatccacagaaacgacgaatctccccgaaaccggcgccttcactttaccgctgacgctggctaaagagttagaatttgataacgttttgttgtacgatctgactaacaattattataccgagccaactgtcggccacaaccgcctctataccgccatttcgcgggcaacgcatcaattgacgctcagcgcactgggcaagttgccggttgaattaaatggccaataaattggtcatttgactgactaggctagtcctcaaaatataaacgctcgctgtcgcactctattcaaatacaaactgattgttgtacagttcggcgtagaagcctttttcgtctagtaattcttggtgactgccttcttcgatgatgcgaccgtctttgaggacgataatgcgatccgcattgagaatcgtctttaaacgatgggcaatcacgaaactggttcggccttggatgacgttgtccatcgctttttggatatgactttcagtcaccgtatcgacgttacttgtcgcttcatccaaaattaagagcgctggaccggtgataatcgtccgggcgatactgatcaattgtttctgaccggtactgaagatgttatcttcttcactgacagccgtttgataaccatcatctaacgtcatgatgaagtcatgaatgtgggcttgctgggcagctgccaccacttcttcatctgttgcatcgggtttcccgaagacaatgttgtcgcgaatcgttcctgagaaaagcacggattcttgcaacacgatgccgacgtgcgagcgtaatgcatccaaatccatttcacggatatcaatgtcatcaatcttgactgcgccttgatcaacatcatagaaccgattcatcaagttcatgacggttgtcttcccagaaccagttggaccaaccaacgcaatcatttggcccttatccacttcgatattcacatcatgcaaaatttgcttacctggtaaatagctaaagtcgacatgttccatggtcacggagcgttcaatgccctcaaattgcacaccgtcggttggacgcacttcatcgtcttcatcaaacacttcattcactcggcgggcaccggtaattgccaattgaatcatgctgtaactcgatgaaagttgtgcgatctggttatagaattgttgtgaatattgaacgaatgttacaactaagcccaaagcgatcgactttttaatgtcaccgttcaccgctaaccagctaccataggaaatcacaattgcggtattcaccaacgacatcccttgcatcaacggaaagatcatcccagaataaatctgaccttttaaagtcgccttgcggacattttcattatgttcaatgaagccatcaatcgtttcttcttgaaggctgttagtaataatcactttttggcccgtgattttttcgttaatgtagccattgagtttcccgacttcatcttgttgcacattaacgtatttttgcgctttattaatgatgatccaagcaaggatgaatgaaattgggacggaagcaattgtcacccaagcgagctgcacatcttttctaaacatcataatcaataaaccaattaagagcgccgtgcctgatacaagttggctcaacacttgattcatcgcattgtaaatattatctaagtcactcgtaaagcggctgagaatatcgccatctgaatgacggtcgaaatatttaatctgcattttttggagcttattgaataacccaatccgcatccggttggttgataacgcgttgacgcgtgagaaaaccgcgcctgataccaacgtcgctgctgaactaaagacgtagaataaaatcaacgatacaatcacctctacgaaggcgtctttagatgccccactggttggcaaatgttgggcttttaaaatttgaaatttcgttgcatatttgactaactcattgagcgcgtccccgatatattcgggtgctttcacctgaagataagtcgccatcacagtcatcacgaggatgattgcaaaagaaggtttataccgctttagataatggaaaaagaacttcattgctcggttaaattctcgcattggttatcctcgctttcctttttgcgtttcaaagatttctcggtagacatcactggtttcaagtaattcatgatggttaccaacaccgactaaacgaccttcatctaacactaaaatccgatccgcgttgaccacagatgaaatcttttgcgcgataattagtgttgttgtgccagctaattcacggtctaacgcctctttaactaatttttcagaccgggcatctaaggcactagtactatcatccaaaatcagaatcttcggttgcccgattaccccccgtgaaattgagagccgttgtttttgaccaccagagaagttcgcactgcgttcttcgacggttgcatcatattgatcagcaagcttttcgatgaactctttggcttgggcaatccccgttgcgcggtccatatcggcgtcatccgcatcttttttcccgtgcttcaagttttgtgcgattgtgccggagaataaaatcgctttttggaggacaaatgaaacggcgctgtgtaaattatgttcgtttaaatctttgattggcacgccgccaattttaatctgcccttcagtcggatcgaacaagcgcggaatcaattgcgccatcgttgacttaccggccccagttgcgccgacaatcccaatcatttcaccagcgttaattttgaaattaatatctgttaacgtgttacgatcgtcttctggataacggaagctgacgtgatcgaattccaacgtccccgctaagtcttgatcagggacatctggataaacgatatcaggctctgttgaaagaatttcttggagtcgcttcaacgaaactgccccacgagatgccatcatcatcatcatgccgcccatgatgatcgacatcatgatttgcattaagtaattcataaatgaggcaatcgccacaatcgcttctggatccgtatcgactaagttcccaacgaaatagattgatgcgacaaccgctaagttcgccaccaacatgaacgctggaatcattacagaaaaaagcatcccgacgattgtcgtatggtgttctaattgattgcttgtttttgagaagcgactgatttcgttatcttcttggacaaaagacttcacaatccgcgtgcccattaaattttctttagcgaggttattaatcttatcgattaaattttggatggcaccgaagtgtttccccatcgaacccattgataagaatgtaatgatgaagaccgcgatcactaagagcacgataatccaccataaactcggaatcgaattcatcgcaaggatgaaactgccgacaaataaaatcgggattctaaaaatcgtttggagcgtcatcataatgacgttttgaacctgggtcatatcattggtcaaacgcacggataaattcccaactgagaatttttcaatattggcaaatgagaaagtctgtatcttccggaaagtagtttcccgcatatcggcagtcattccctgcgccgtcatcgccgacgtaatggtgttgaccacgcccgcaattaaaccaaccacggcaattacaatcaaataaattccaatttgacgtaccttatcttgatcgcctttcataatcccttccaaaacatcttgtaatagttttggttgccatagtgaagacgcaacagaaataaccgtcgctaaaatggaaagactaaacacgccccaataaggctttaagtgctgtttaagtatcgacatgagcatccctctttttctgtagttgaatctcctgtacaaatcctgtacagtataatcgaacagtgttcgagttactactttatcaaattttaaaacgaattacaatcatcttttcataaaaagtgaaggagcttcattaatatggtaaaacagtcaatctctgccgagcaaatcatcactgccgcgtttgaaattttacaagtatccgggaccgtcgatgccctttcaattcgtaaaattgccaatcaattagacatcggggcggccacattttactggcatttcgaaaacaaacaagccctcctacaggcgatggctgataacattattcaacaaattgagattgagccatgtaacacaaccttagaatggacagaccaaattcgccaaatttttagcgccatttacaccacttacatagcacagccctatgccgctgagttgatgatgcggaccgtccctgcaactaaggcccgcctaggtcttatcaaccacttaattcaaatccttttggatgccggtttcacgccagaacaagcaagcctagcgattgaatccatcgatcacttcatgtccggtctcttcactgacatcaccggtgagcttgagatgaaacatcgcgtctcacaacataaagacacttatcttgcacagttaccgcttaaaatgcagcagattgcgactgacaatcattacaatgctttcttaaaaacttttgaacatcatcggcaccaacaacaacgctcactggaaaaattcatgctaggcctcgatattttcctcgctggtttgcaacaacaacttgcttaaataaaaagcgcgcagacaactgattgtctgcgcgctttttacatttaaactgcttttgaacgaatcccgaatccataactcagagccatcacgccgacaatcatgatcatgtataacggtaatcgagtgttcgatcccgtatgcaatagactcatgccgtacgttaaggcgctgattgcgaggtagtagccaaaactaaacaacccgctggccgtgccgatcacatcttcgtaacccactaacgctaaattcaagaccaccggtaaggtcgtattcaatccccacaagaaaagaggccgtgggacgacctcttcttttgtgggtttctagctttaacgcgctttttgaaactgacttctgtgcttagctccaatccgtaaacaatcgactacgtcgctcatttacagatttaggctagtgctcgaagtcaaaacgtttcaaacgcgcttctatttctttaacgtgcttttaattcgcaaccttctgcgccttgctacatcaaccagacaatcgcccttggcgcttatccttctgattaggcaagtgctcaaaggctaaccgcgaattaacgcactcatttttttaccagcttgcttttttgacgcctgggatttggcctttatgggctaattcgcgaaagttgatgcggctcataccaaattgccgcatgaaacttcttggtcgaccatcgattacatcgcggttccgcaatcgcactgggctagaatccttgggtaattgagaaagagctaagtaatcgccctttgcttttaattctgcgcgcaagtcagcgtatttcgctactaatgcgcgttgttttgctaattttgccacttttgatttttttgccattgataaaactcctttttaccgtgctttcaaaagcatcctgttccggttagctacattagccaaacaatcggttacgccgctaatttggctaattaggctaatcctcacaggataaccacttttgacgcactcattttctttaacgtgcttttaattcgcagacttctgcgcttagcaccgtgaatcaaatcatcgacttcgtcgctaattcgcttccccgtactaatactcaaaagttgattaagcttgaacgcacttttccccgattgaaatagcctacgctaactatttatgaaatgcaattaaaaagacttataaaaagtaaccatttttcaacactggcctgtgctatacttaatctaagttgatttcacagaaaggggcactttcagatggcccaaaaaaacattctccaatacttaattctcgggctgttaaatcagtctcccaaaaccggttatgatttaaaacgcgtctttgaagatgatatcggtgagttctggcaagcccaacacagccaaatctatcctgaactcaagcgactcgaacaggctgatcggatcacccacgtcgaattgatcgccggaacaaaattaaaaaagaagcagtattcaatcactgcagatgggattgccttttttgacgagtggcgatactccccaaccagcgaaattattgccagcaaagacgaatttattttgaagctatactttatcgactcaaaaaatgatgctcatttagacgcaatgttcaccgaacaaaaaaacttacaccaagccaaactagatcacctactcgaccggcgtcaaacccttttcagccaacaagctgcggtggatgcgcactatggtcattatcttattttagaacacgcgattaaccgcgaacaagactatcttaattggttaacaaccgcacggccgtaaaatcgacccttaacaaatttgagataagtgctatcctattagtaagaagtaaatcaagttaggctgtttcttcatttgtatacgttataataacgcgcttgtacaggtggtcagttgaccaattgtatgggcgctttttttatttgatccagcaacctagactttaacaaattcaggaggaatattattttaaagcgcaagaatgttgataaagtcgtcttcatccccacgatgttactgttcgggattgtctccgcatttttaatgttggggggtgacacgcttcagcagtcgatttcacaactacttgatgtgatgacggcacattctaaatggctttacattggtatttatatcattaattttattttcctattttggttggggtgtagtcactatggccatatccgccttggccaaccaaatgaaaagccagaatataacgacttccaatgggggagtatggtttttgcaactgggattgacgctagcatcttaatgcttagtaccactgatccactgcaatacttacagaacccaccatttggcgctaaacctttctcggctgaagcataccgctacgccaacgtctgtgggcaatttcactggggacccatggcatggatgatttttgccaccgcgactgtcgcaattggctacgctctctatgttaagaacttacgggtacaacgtttaagcgccgcaatcgacctattagaaggaccacaaccttacaaaaaaataattcgcaaattaatcgactttaccgttgttttcggcattatggggggcatcggctcatcaatcggaatggaaattcccgtgatttcaaaagtcttgagcacaatgaccggtttgaatgataccatctggcttaaacttgccctcttcattatcttactggtgctattcaccctcacggtatatgccggcttagataaaggcattaagaagctcagtgcttggcatatctatactgccattggctttttattactcgtcttactaatcggtccgacattcaagctaattggcgctgaaggccgcgatgtcttccatctctttggtaacttcgggcgtttaagtttaaatcagactggtgcacacagtgcgttcgcacaacacgaaaccctcttttactggggatggtggttatcttacatgcctgtcatgggcttattcatcgctcggatttcacgcggccgaaccattcgccaagttttattgggaatggcgacatacggcgcatttagttgtatgagcttttacgctgtacttggcggttatgcgctcttcttacaacgttccggtcaaatcgatcttgttcatctattgaatacccaaggacaagccgctgtcatcgcggcggtcatcacgaccttaccgttcaaaattatcatgttagcaattttctgtctgtcatgtttcattttcctggcgacaacgatctcttcttcggccttcatcgtctcatcatttaccagtcttgaattgaaaatcggagaacaacctaatcgttggaatcggatggcttgggtgatcattttcattctattttcacttggaattgtacttgtcggtagtttccaaaccattcaagccgtttgcgtgattgctgggttcccattgatttttgtctgcgcattattgctcgtttcgatttttcacgccgttcatgatggcgagattcccattgaaattgaaaaagaagaaacttctcattttctgaaaaaaaagcttacgccgaaattttttatgtgatacggttatatctgttaacttttcagaaagaaggaatttaaaatgccaaccaataaaaaagaaggtattatttttacaacattaatgtgtttctgcatggtacttggaatgagtatctataacttagttttacatgatagtctatcatggggtgctttgtctaccggtttaattccaggtttcatcgtcgcatttattctagatgtattcgttgtcggtgcaattgctaaaaaaatcgcatttagcttaccattgaacaaagaaaataaattagtcatgattctcacaatttcatgtttaatgattctcggcatggtcacatgtatgtcacttttcggaattctcatcgaaggtggtatccctgaccacttaggtagtgtctatcgtcacacatggttgatgaatgtcatcgtcgcattaccattacaactgatcatcgtgggacctttctcacgcgccattcttggtaaaatccaagcaaacgcagccgcaactgaaacagctgaataaaaacaaaaaaaaacgacgactagcttacgtagctagtcgtcgttttaattatgctaatattttttgaatagccgctaattcttcggccgtaaacgttaagttatctagtgcatgcacactgtcttgtaattgactcaagcgcgaagcaccaactaacacactggctacagtcggctgttgtaaattccacgcaagtgccatttcagccaatgattgcccacgttgttgcgcaattttgttcaattcttgaaccgtactgattgtttgatcaaccttttcaggtgataggaagggactatctggacaagctgcccgcgaatcggctggaatcccgtttaaataacgattggtcaataatccctgtgccaacggactaaacgtaattgcaccgataccttcatccgccaagacatccgttagtccatcttcaatccatcgatcgagcatgttataacgtggttgatgaataataaagggtgtcccgagcgctctgaaaaccttcgtaatcgctttggtttgttctgccgaataattcgaaatcccaatatatagcgcctttccttgttgcaccaataaatctagggcccgagctgtttcttcaattggcgtatctggatctggtcggtgatgatagaaaatatcgacgtaatctaactgaagtcgttttagtgactgatcacagctagcgataatattcttcttagaaccccactcaccatagggaccgggccacatataatagccagccttcgatgaaatgatcatttcatcgcgatagcgacgcagattatcatgtaaaatgcgcccaaagttttcctcggcgctgcccgctggtggcccctaattattcgccaaatcgaaatgagtgatgcccatatcgaacgcgccaaaaatcgtttccttttgagtcgccatcttatcggtttcaccaaagttatgccataaccctaatgaaatcgctggtaatttcaacccagaatgcccgacgcggttatattgcatcccttgataacgggtttctaatgcgtgatacatgtacaacgccttctctactcaagtattttgactatttagccgatcgtcttaattgcgtcttccactaatccccagaacttctgatgatcgagttttacagcgactgatgtgtgacagtctgttggaattgggaatctaaaatcggcgaccgtcatcccacgcgtcaatgttccattgagttcgatatcaacgggcactttcttagtggtcatcacacttggatcaatcacgtaagccacggcacatggatcatgaacgggcggtacatcgaaattttgccccttcttgtacatatcgcggaaaaaggctaacaaatcaaccacgaactgagacgtttcagtatgaatgccttcaatttgttcaacaatatctggtgtcgctaacgcttgatgcgtcaaatccaaaccaaccattgtgacatcccagccggcattgaatacaatcttggccgcttctggatcaaatttaatgttaaattcggccactgcactcgcattcgcttcgtgataaccgccacccattagaacgacttctttaacgcgttcaacaatcttaggttctttgcgtaccgccattgcgatgttggtcaacgcacctgttggcactaatgtaattgtattagctggatgcgtcataattaaatcaatgattaaatcaactgcatgacttttttcaagcgccaccgttggttctggaagaacaaccccgtcaaggccagtctccccatggatatcagctgctactttaatttcttcaattaatggtcgcgaacacccagcagcaatcggtacatcgtgcatgccgatcatggtcgcaactgcgagggcattgcgcgtcactttcgttaacgtctgattggcagccaccgttgtcactgccaacaaatcgatttctggattgccgtatgctaacatcattgcaacagcatcatcatggcctggatcacaatcaagaattattttctttgccattcgtaaaacctccactctctttcacttcgtgcatactatcactatagaatttaagcggtttcaagtcaaccatatataataaaattcaatcatgaaacggagtctattatgcgcattgatactggcgaataccctaccggcgaaaacgccgtccaccctaagaaagttaaacgtttaaaattacttagcaaggttgcaacaatcacctgtattacgatgtatgtttcatacatcccccaaattatcgctaatttttcagggtcacctgtctcacctttacagcccttagtcgcaacaattaatgggtgtctatggaccgcctatggctggaataaaacctataaagattggccggttattatttctaacatccctggcgttattttcggactcgttaccgtaataactgtttatattcactagaattgtttgttaaagccacgatttgcgtcaaataatttttgataactaacagaaaagcaatccatcataagttgcttctctgttatttttttatccctttacccaaacataaaaagccaaggtgattccttcttttatcgaaagaaaaccatcttggcttcactttgaagtaccgactatgggactagtcggccttaagcttgttattttgctgctcgtttaacgtatgtgccttcttgtgtgttgatttcaaggacttcgtcagcgctgatgaaatcagggacactaacgactaaaccagtttccatcgttgcaggtttacctgaaccagtcactgttgcgcctttaatcgaaggttgtgtttcaacgacccgtaagttaacagtagttggtaaagtaaccccgatcacttctgaaccgaagaattgaatcttgcagttcatgttttctaataagtattttaattcagcttcaatagcagctgtttgaatttcatattgttcgtaagtttcaagatccatgaagaatgccacgttatcttgtgtgtataagtattgaacatcttttgtatcaatcattgcttgttcaactttaacttctgggcgcattgttgtttcaacaattgagccagtccgtaagtcacgcaacttaacacgcataaccgtgtttcccttacccggtttatgatggttagcttctaaaactttgattaacttgccgtcttgttcaaacgtcattcctgctctgaggtttactgcttcaatcatgacttgatctcctttatttaaaaaaatattcatctctaactgtaccaaatgaaagccgtttaatccagccctcctgtggtagttatcctatttaatgtcgagtttatgaatcttatccgctggttgtggctcataatgttggtacatcttcgtaatggccaccttaggtaagcctgattcactaatataaatattaggtttgaggtatttcttattttgcacatcttttaagtgataatgttgaatcacttgtttctgatggccagtcggcgcttcatcttgaccatagaattgaatcttggctaatggtaagctaatcgttgcattattaatcttgaaataagcaacatctcgattgctgccaagatacgtcatcttttgttgcttatcagcttgatagaattgctcgatttgcttcatgctgtgattatcgaccagccggacaatcggttgatcacctttgaaaaggtgtaagccatctagcgactggcgcacgttttgagcactcaacatcaaccagacaatcaccaacatactgataaagtacacaatatgtaagctaagactgctagcagcatgattcaaactaaaagtgtagctatcctctagctctttattcatgatttggcgccgaatgcgcattgcaataatcttatacgataggtaccacactacaagcgcgactaaggttgccccaaaagctgtcaaaattgtattttttagaatttctgaatccgtcaataatggactaaagccgctcacaagtttaattgtgagcgcgccaaggattagaatcacaaccatttgtagtacaaaaaaacgggtccgaatacttttgctaatctttgtgggtgttaccactttcgtcttatctcccataccataaatcctcccttgttaacctacttaccattttagcataccgtttccatcaagttgattaaaagtccctcgttggcttattttttacaaaggcatctttcttcaaaggtagctgttcaatatgataaggtgaagttaatcaaacggaggtgtcgatatgttatatccagaaagtttaactcaattaatcgccgattcaaatcagccagtcatctcgttattcattaacttagagactggcggacaagccattaatgcgaacaagattaagctcaatagtttttctaagcaaatccgtgaacagttaaccaccgactatcctgaagaaaaaaccttactcaaccaacttgaggacttactaagtaccgctccccaagaattagcacatatacagtcagttgcgttttacatcacagctgctggtcactacagccaaccccttcattatccgatcacgactgaatattttctaattgctgatcaacccgagctgcgtccactcagttcggaattaagtctgagtctgaacgggaccattctctgtctcaacaagactacttttagtttgaaatccattcaacaaaatgtcattcgggattatcctttacctaaagacgccccaacaaccattgaaattgggattggcacagagcgtaaaggcgaagtcgtccaaggcttctcaagtccaacccacagttttgttgtaaaagaaaatgaacaacttatcgatcaaactaactatttccgcgtgattggccgctatcttgatgacttgctgcctgaaaaagcaccgatttacgtggtcacattacccggcaacttaaatctcttcaaggaactcgtcgttaatccaaactaccggatggatcaagccatccaaacttcccctgattctctttcagatgacgacttactcgacaagttactcacaaatgcgcgtcatgaactccgacaaaaagcgctcggattagcagaacgggccgctagtgcgtatcacggcgattcaaaccttggtgatcctgagattattctttcacgcattaacaatcgccaactaacagcactcattatcccaactgcacttgcaccatcagcaacaatcagcgccgatcaaatcatggatcttaatcacatgatgattgcggccatccaaaccggcctgccattctacccagtaccagttgaaaatattccgacaggactggtggcgatgggaatttaactcttaaaacacgtgccaatacagcaacgtatattcaagcgttgttgtactggtccgtgttttttgagttgcaaatacttgatctagataagctgccagttggtccgttggtaattcttcgtaataggcctccaaaaatggcctgtcgaaaacttcacttgtttgatattgaaaaatttgttgactaacttggtagcccgcatcttttaacacgttttccacagctgggatgatttccggtgtagtgttgggatcttgctgttcaatcccaaaataacgttcaagcggtgtgaacaagtcgtcctcgtttttagtgagccgtaagaatgcacaccactgacggctcttttcgctaatcgtcagtaatgcttgattggcttcgattgccggatttaacgccatccaaattaaatcatagcttttttgtggcgtttgcgccataaagtcagccacagactgctgttgataagcaatctgttggtctggtacatgctgtttagcttcttgttgtgcatactggagcatttgcgccgagatgtcgataatcgtataagcctgactgttttgcactagaggtggcaaataacggccgctaccaccacctaagtcagccactgtctcaacaggcagtaatcgccgatcctgtaaaaaagccacaacgtcagtgacaatcgacacctgtgactcttgttgaatctgatagtattccgctgcaaaatcatcccaaaaagctgcgacttcattatccacagtctatcctccgcttaaacttttattttctcagcttagcatataaaaaagatgccgacaaaataaattatcgacatctttttgaaacgtgctttttggttgcaccaacctccgcttaatctaaaatactcagttgctatccgcgaccgaacacacgcttttttaaacgtgctgcaatcgccatattcttccgttgttaggctaatcctcagaatatctccggcgattttcgcactctttatctcactaccagcactgggattggtgcgtattttgccatgtaggcggcttggctgccgaagtatttagcaacgcccttttgtgatttcgaaccgacaattaacaaatcgggtttaaccttaggaatcacatcttcgataatcgcttcgcctggttcgccttctgcaattactgttcgcacatgattcacaccgcgcacataggcttgatcttgatattctcgtaggtggttttcaagatcctcatattggccgtggataaaatccttgttcaatgcttgatagacgttcatttcgtcattttccaataccgatacaatgactaattctaaatcctcacgtttagcccgctcaattgcataatcaaacgctaataacgcatcctctgagtcatcgaccccgactaaaattcgtttaatttctaaaactgacatgtgaccaacctccaattaattttcagttgctaattgctgttcaaaccgcttattgcctttatacaattcaataatcatccaaaccaataatgccatcacaccagcaatcaacacatatgcaatgcgatcagcagtagccaattgtgcagcacttgcgtgatcaccatagaaagcttcgatttgtcctggcaaccccatcatattcaaataggtcaagccaatgaccgataaccaacctaagcttttaatcaaccaactattcttgaagcgatcccccatctcaacccggctgtcggtaaacatcaacagtggcagcattgaaaatggtaaggcaaacgctaagaaaacttgggaattattcatcaaggtattgagcgcctcatgctcttccaaggctggtttattgctggtcatcatgacgcagattaataccggaatcaccgataacaagcgggttaccaaacgccgcaaccacaatggcattctcaagtgaatgaacccttccatgatgacttggccagttaacgtcccggtaatcgttgaattttgcccagaagcgagcaatgcaacggcaaacaaagttgataagattccggtccgggcaacacttgcaagaattccgttactcattgttgaggtatctgacaaagcttcaaataacccgaagaatgatggatctttaaccgttcccattttaaaaactgcaacccccatgattaataacaacgcattaacgaaaaatgccatcgtgagttgaatgtttgaatcccaagtggcaaagcgcactgtttgtgcaacctgtgcttcgttcttgcgatcaatcttccgtgtttgcgaaatcgcagagtgtaaatatagattatgtggcataacagttgccccgataatccctaacgcaccagtcaatggggttagtccaccaacagctggcccggtggcaaaggtcttagcagttggtactagcccaacaatcacccctgcccaatcaggatctgagagtgctacttcataagcaaaaaccacaaaaatcacgacaattaatgcgacaacgattgcttcaatcttacgaaaaccaattttcgttaagagtaataatagcatgacatctaaaatcgtaatgaatactgcaatcagcagtggaatcttaaataataagtacaaagcaattgccgccccaataacttcggcaatatcggttgccataatcgctaattctgtcaaaatccacaagacaatgcccaacggtttactcgtccgtgcgcgaattgcctgtgctaagtccatctgagttacaatgcctagtttagccgccatatattgtaataacatcgcgattaaactagacaccaaaatcacggacattaacaggtattgaaaactctgaccaccagtaatcgatgttgaccaattccctggatccatataacccactgccaccaatgcacccggtcctgaatacgctagtaacatcttccaaaagcctttgccctctggtacttcgaccgtcccattaatttcttcaagtgatgggccgttcgcatattcaatcagcttgtgcttcttgcccttttcttgttgattcattatcctcactccttattttgatcttgataacagttttattgtacgccgttttaatgaaatgtaaataaaaagttaggcaatgctaatttattttattcaaatcgataacaaatttattaacgcaagctacaaaaaaagcgccgtcgaaattattctcgacggcgctttacatactgctttaatcatccatttctttttcaattagcgcgccagtttcagcgtctaatttaacttgcattttttgctgtttttgatgaccttctacttcccagactgttcggccatcatctttttccaatgaccatttgatcacgttcccggtgaagtattgttgcgctttttgaagagcttgttgaggcgtcaacaattggtcaaacgctaattgcttttggtgtcgctcgacgccattttgttcatcggcatcaagggcttctttcgacaatcgactggttgcgccagttcgagcatccacatgcatgtgaagctcttcattgtcgttcattcccgttaattcataaaacatttggttaccccattgcttcagctcaacctcggttaaatctgatgcaggatattgttttgcgtacaattcacgggctttttcaagcgtcactttcggagcttgaaccgtttgttgcggactagtcgattctttttgagcggggggtgctgaatgttttgtttggttggctgtacaacccgtcaataggccgagcgttactaaactaacaatgattgttgttttgcgcatcctgttctacctcgctttgttttgatacttaaggataccattcaacagggtaaattaaaaagcaatatcccttcctagagcaatgttgtccccactttgaccaataaaccaagcccatacacgatgatgatgatggcactcactaagttgacgcccatcaagaattttggtgaaacttttttccggaaaaggctaaagataatggcgataccaaagaaccaggtcgcggttgccgaaacaacccccacgatgaatggaatcgcctcgctactcgtcatgccaccccgcaatgcgcccagcattaatgtcccatcaatcaaggcttgcggattaccccaaaccgccacaaatgcagtcaaaataaccttctccagtggcattggttctaacgcgccaaacgtaacggtactgcgggcactttttaaaatggtgtatccaatccataaaatcaaaagtccaccgattcccataatggctaaccgaaccgcatcgttttgcacaatcagtgcgccaatcccataaaacgccacgagtgaaaagagcgcatcaaataaccagatgaacaaactgttgaaaactgcccgccgtgttgtattcgacatggcattattaaaaacgaaaatattttgcatcccgattggtgcgacaaacgcaaatcccatcaagattccttttaaaaagaacatctattaacctccttggcaagttacctttcagcgtaacatatctaggctaaactttcttgtctggatttaattgtaaaatcagcatcgtcatcaacaagaataatgctgataaaatcaacgtccgttctcctaagaatgagacacatagtccgaccatcactgcaccaatcgtaaaactgataatgatgcgtaaaatttgccagcccttatcggctgccttacgatcatgtttaaaaacagcgtcataaaaactttccgccatcgtccgtacatttccagtcatcatcaatgatgtaaatgggccaccatccaattcacgaaattcctgtaattgcgcagccgcaatgattgaaacaagtgaacttgcaacaatatccggtacatacggtgaaattcccgcaacaatcgttaagaccaagacttcaatccccaagataatccgttgtcgtttgttaatcgattcgtctttttcaaaccgatgttgtaaaatgcgcgttaagattgttcccaacataaaggcgagaatcggggtaatgtgccgtaataatacggaccatttcatctgccccaaatgggttcctaataaaattagattccccgtttgtaatccggcgaagacttccccgtgcaccaaataagtgtaagaatcaaagccccccgcagctgccagtagcccgccatataataatttgtcgctcattgtcattttgttccgcattaattcatcctactcctcaactaaactataagtattaactctatcggaaaaaccactcgccgtctacaagtagttatcatttaaaacgttatcaaaaaaaggcctcagcaaactgattttgctaaggcctttttggcttaattttctacgtcaccattgaaaccggctaattgacttgaataaattgataaacgcgtcgcataactaggatggtcattattttccttgaccacttctttaagcgtcgataattgatcggtaataatgccgtcaacgcttgtaaataacatgcgttgcatcacatcctcatcattcaccgtccaagcatatactgtctgccctttgccgtgtgcttgacccacaaaatctgagtcgagcgtcgtcacttccatcgtatagccattagccggcgtttgggggaatgtaatgttatacggcagaataaaactaacaaatagttggggtgctttttgtttaatttccgccacaatcggataacttaatgaatgaatccggttatgattcttcaaaagtcgtttttcgtatttatcgataaagtgttgcaccatctgtggactgtcttcattcgttgtcttaatttcaacgagtagtttttgatggtgcttttcggctgctgctagatattgatcaaaactagcaacctttgcagaatgaccattttcacggacagtcaatgccgttaattcagcaagtgtcatgtcatggacgccgcgatcgacacccgccaagtgttttaaattatcgtcatgcatcacgacaaattgttgatccttggtttcatgcacatccatttcaacataatctggctcttcctgcgccgttttttcaagtgctggaatcgtattttgcacaccattaccatcatctaccccgcgatgcgaaatcaaggccggttgatcgtccaacattccctctaaatagacataattgtacaatgctaccccaccagccacgataacaattaaaccgattgtgccaatttggcggagaatcgtcaaattagtccgttttttcaccttagattggcgcacagccgtcgccattgcgggaacttcaccatattggttcaatacaatctgtaagactagtaccaccgttaatgcgagtaaaatctgactgacgatttctgaaataaacagattcaaaatggctaaaaataaagcctgatgtggcaagtgttggtcgtaataccgttgactagcaaacaagattaagcggaagcccactccaacaattgctaccgacgttgttaatacaaagccttttagaaaaatacgccaagcctgatattgggtagcttgccaacagcgtttgagcgtggttcttagctgcgcctttggatgtgcaatcgtttctggtaaaaacgtgattaagcgaattgaaaggactaatgcactcgcgtagaccaagataatggggacccaaattttgggtgatgaccacatatcctgaataataaaatctggaacggtcaccttggataacaacgctgatttaaagaggacctgtccaaagggtaagattaataagaaatacagtaaaccaaccaacatcgtggttggccgtaaagcgactaatccccggactgtttccttaaaaatcatccagtatgtttcttgtgtttgcttttgaatatggcgcatactgcgcaacaagaacgtcatttgcagataaactgccgcgcaaatcaagaccagaatgattagtaagctaatcattaaaagcggatgacgcatcatcaccggcaccagattggtgtaggttaaatacgtcacgccattgagtgccaccaaccgttctacaagccacgtaaacagcggtgccaccaagctgccaataattaaattcgtaatgacgagcagtaataaataaacactccaatgttgtctaaagagccgataattagcccttaaaaatgatgttaaacggcgcatataagttcctcccgaattgttacgttaaaattggtaataatgaaatcatcagataaatcatgctactaatgagaacaatcgcgacacttgtccaaaaattacggtgcttttgaaaatgatataaggccaataaactgccccaatcgagcagttcttgacttggaaccgcaagccacgataacgtgccaaatattaaaaaactgacaacgactgccgttaacaagcgcaagaaccaaccggatacccgtagactttgtaagattgtattcacaagctgaccagtcgtaataatcaccatcatgtacaaactaatgaataatatctgacaacaaaagaaccatgctaatgtcggccagacctggttctgataaatcaaggctgcgtaatcatttattagaccgacttcaagtgatttaagcagtacctgatacattaaaagggctccaacgattggaatgccacaaaggagtacaattgcaccgatagccccacgaatattgcgccaactaggaagcccaaatgaaccttcttgtgccagccataaaccatcaaaacgcgtcaaccaccatcctagcgcaatgactaacaccaagtaataagcaaagcttagaagacgtaaccaccacggttgtgcggctaactgcgcaaagtctaggttaaataattgcaacagtggttgattcgtattcaaaagcgttaacacaaagatcaaactcgcaaggattaatccccatgtgcgcttactgagcttttgcatcatcattttgctttgcctcctttaccagagtatcaatatcaaacgatacaacccgaccaatccgcgttttagcatttaatgcataggctttggcaccagattcaaaaaccgcatataaccgattgccatccaacgtaatctactctaaatgagctggcatccgaatcttaagtagcgccttttctggcgtaaattgttggggccgcccagtcgttgcaaaaacgtaaatccatgaatcgtctaacccgtaggactgcgaaaaaaaagcccgcgtatcactaaaagttagcccttgaatcttatccactgcttgccaacgttgttcacttttaagttcattactgcggatattccgcgccgtcaatttaacaccagctttttcgcgtcctttaatgaccgctgaaacctgaaacgactggacgttactatccccgaaaatattgaaatagccgacccataatgccccatcgtgatagctaacaagtgaagcccgggtgatcgacttcaacaacgttgaatattggtattgaatcggcttttgcggctgatctgcagggtactggcgaatagttgttaacttaattgcaaatagctgtgcacgtgccttcttacggccacaaacccataagagatcatgttcaggatcataagtaattccaccaacgtgtggtcggccctttaaaataatattcttcaaatgtcggccagtccgcttatccataatggacagaattgagttgccttgccgttgatggtcataagccgaaacgatcacatagtccggcgtaactgctcccccttgaggtgtcatcatttctgctgtatatgctttgtaacctgccggcgtttttttcaacatctgcgcctggtctaaatctggcaccaagtaagttccagattgggttgcctttgcatactgtccaaaagaagccggcgttaacccttgatagtaacccaaatcccgttttagatgagggagtgtaaatcgcgcataaattacctgtctagattgcgtgattgcctgttcagtaaccgtcttagcaggaccgaaaataagccacaaagcagctgataacaaaagcaagcagccagttaataaaaaggttgttcgtttttccaaatgcatcatcttactccttatccgcaacaaaattagatacttgttgattccctcagtataccaaactctgaatttaatgtacccctttaacgaatgaacgaacaaaactattagatgcacacaaaaaaagcataaccaactaagtggttatgccttttttgtgatggctaatactttaactttccatttatctctagaatttcatcaatatggtttgcgtaccaatcttcatatgcctgaccgacaagtgctaatacctctctccctttgtcggtaaccgccaatgatacccgtcgctgatcatctggtgtcccaaattctttggttatcaaacctttccgataaagagtgttgatcttgcgtgacgttttaggagcgccaccaccaatttccttagcgagttgtcctggcgtaatcgcttgcttttcttcgattaactttaagattaaatggctgtcaaaactaacaccatattcttcaccaatttgattgagtttaaattgaatcgttttgattgcattgacccaatcaacaaatctgttaaatctttctttgctttatcttcagtcattttatattctcctactaaactctgttgccatcatttgtaaaaccaacatttactaataataaattagcttataattaagcaatattataattattattatctagttcatcgcgctattatcttttgtgcaagtcattatagtcttaatttcataaaaagtaaatattttttaaaaacttctacgacaatcaagattttcggcagtgattcatttacaatttaccaaaatccacatcaataaatacctttttatgactagagttactcagatgaccttctagatttgatttatattttgtttataaaattgattttatttcataaaaaaaggcccgcatctaggatgcgggccttcaatcattaatgtctagttatggatataagtaaatgccccggcatttgaaattgtttgggtgttaggaccagcagggttgctgaagcccatcccaccttgagtgatggtaattgtcccagctgcggcatcgtatgattgaacgtaagcaacgtgaccatatgtcccatctgcggcccaagaacctaccatttggccaccagcaaagctaacgattgcgcctgctgctggtatatggttaactgtgaagccagctgctgcggctgaagcaccccattgagcgccattcccccagttattgccagcccaaggtgctactgacttaacataccatgtacattgaccccatgcatatgaattcccagctgaattaccagcaacttttccactgccaccgaaaacagatgtgccacccttattatctgatggcgtgtcaattgatgtaggttgaggtgtgtcttttttagcattgttggcattgttggcattgttggcatcgtctgcagcctttttagcagcagcgtctgcttcttcagtacttgctttgtcgaagtctgcttgtaaagctgttaattcgtctttgttatcattgattttttgtgataaagctgtttgtttttgatcagcttcactcttcaatgattctaagtttgctttttgtttttctaaatcagtcttagtagcaactaaacttgctttagtattttcttgttctgtcttcaagccgcttaattttgccttagcgctgttaacatcatctaaagcttctttacttgcttggtttaatttattaattgtgaatgaacgcgaaactaaatctgaaaggtcatttgagtttaaaaggaagtcaacatatacgttcccgctgacagcatccccactcttttcttgtaaggtcactaattgtttcttcaatacgactgttcgtttagaaacttctttttgagcatccgtaatttgacctgaaagagattcgatttgattatttgctttagtaattgctgcttcttgatcagcaatttttgaagcgtttgttgaaatcttttgatccaacccaatcacttctatattagctgattcgatttgtttgagcaaatcgtttgttgcgttcttattagcagtaatcgcttcttgtgcttcacttgaagttgcagcagatactacgtttgttgaaagaactgaagctgttaataatccaagagcaattgtagtcgtaatcgtttttttaaatgacatggtttattttctcctattagttaagcccgaactctgagactaagtatatagggcgaatgttacattaacattacataaacattatgcttacttaacaaatcataaaatataggctttgtaagcgccttttacgactttagaagccgatttcagagaacccttccttattatttccttatcatatttaaaaagatgacgccgaattcattcagcgtcatctttttattagtcatttataaaagtcacttcttcatgctgcgtccaactatccaagcgcgcacttttcagttcaattgcgtagataatttcccgttcacgatcttctgctgataaactatccataaacccagggacttgggcgttgtaataatcagctaattcatctaacttgtactgcgcgcgataaacacgcaaccggctgctagcaatcgtcattccttcgctagttggcattgtgtgaattgccgctaaaccacgatcgagttcttcaatcttaggggtatccggtgctgtcccaaaataccaaatattcggtgcatcatccaacacgataaaccgcatttggcggcttgaaggttgcccattttcatccgaagtactgagcatcatttcatttgtttgattaacgaacttctgaaatttgcgcaaatcattttgatgaatatgcggattagcgttttgtttatcaatatacgcgattacttcatcgatcgatgtaaactgtggttttgtaatgatgtttaaaaagcgcgtccatcacttgaaagctggttgttcgaataatgtaagcgaaccgaagttcaaaaagaatcgcgttagaagacattccttcaggataatcgagttcatagcggttattgactgttgttagctgaatattggcgtctaattcagcaaggtctagttgcaacttttttaagtagcaaattgcagttaatttagaaagtgagaaatgatacataatatcccgaagcatgggtgcttcattggcttggataatatgatctagtatacggattaacgtaattgacttagtggataaaaagaaatctttcataggtagcactcctaacagaaactatttttagcattattcggttaagaactgtctcgcgctcctttatgtgacgagtgatggccgacaatctacggttaatattgtttttgaattaatggttattaatatacatatttaacaacattactgataatagttaatattagcaagttttttatcgatatgcaaatctgttgcatgtagttgttaaagagaagtagttctttaaaaatccttattaaagccgatttaacgggtttttaagccaattacgaaatatattcattaaatttgatgtgcaataatgagaataaattattagaaactttaaaatgcactggttatctagaacgtcattttccaatattcaaaatcaactaatggatgccaattaaaaaaaccttttcaaaacgattgacacaaagtaaaaaagcgcttacaatgactttggtattaaaaatataaaaaactatatcttttaatttagtgaattaggttgtaagagttattaatctttaaaatttgaaaggaaggatcgctttggaatataaagaaatctcacctgcaacattgggtgaggaacgattacgatacgatatccaaaaaggagccttcgctaatctttcggaaagagaattggctgagcgatatggtatcagtcgaacagcaatgcggcgctcgttatcagtcctccaaaatgaaggactaattgaaaaaaagccacgtgtgggaatgacagttaacaataagcatgtgattaacatgctggcaatgagttcaatgtcaacggagttaaatccagacgaaattcaaaccgaggtctcacaaaccgaagaaccagtcgaagaagatgttgttcgatttttgaaggcagatcatgtatttgaactaccgcggaaacgaatgattaatgggaaacccatttcgtacgaattagcttttttaagtcaagaacgctttccagaaattgagcagatctcttttcagaatcggtccctttatcaaacactgaaggatcaatatggggtggtcttaggctacgggcatgaaacgattaaagcaggatatgccgataagaaacaggctatcatattagaaataccagagaagacaccattatatattgtaacaagcttggcttacgatcatgatgatgagccggttgaatatagtgtccagtatctgattgggtatcaaattcgttaccgattagatgcgaaaaatatttttgattatcgtgaggatggtgatttgtgatgaaacaatacttatttgaaaccatttcagacgaaatcgaaactcgcattcagcgtagcgaatttaaaagtgggatgttgatgccaagtgaagctgaattacagcaattatttggtgcaagtcggacaacaattcggaaagccttagataatttagttgctaaagaactaattatcaagaaaaacggtgtaggggtatacgttaaaccccagatttcttcgcaaaatattttagaaatgacgggggtgatgaagaataataacttaggcaacgcagcaaaacagattaaagaatttcatcttcgcaaagcggataaatattatggggaattatttgatatcagtgacaacgcgttgttgtataccatcaaacatgtttatcaagaaaaaaagaatcaggtttacgaaacgattattttaccgcagcagttatatccgactttgagtcttgcggatatccagatggtcaatactatcgaacttgtcaattcggctaaggaaaatttctacggaatgcagcaagatttacagctcgtcagcatggcatcaacgcatgctaaatatttagatctagaagaagatgcgttgctctttaaattgagcagtcagtattacgctgaaaatcataaagtgattgggatttcgaatcgctatgaaccagctgatacaacagaatttaatattgattttaattaagggggacttcacatgatagaatttttaagaattgatcaccgtttattacatggacaggttgcagtttcttggtttaacgaattagatgttaatacgattttagtggctaatgatagtgtggcgggggatgactttcgtaaatcagcaattcgcttggcgaagccagaacaagcgaagttagtgatgaaatcaattgatgacagtattagtgctattaattctggcgcaaccgataaatataagttgttaattgttgttgaatcagtagcggatgcggagaaattaatcaaaggaacgggcgataagattacattgttaaacgttgggggcacaaaacaacgagaaggaacgaagaattattctaaggcggttaacttaaccgatttagaagtcgatcaattaaaagcgctttctaaatctggtgtagacgtctttatccaacaagtaccgaatgaaaagaaaatgatactaccagaataaaaggaggataaactcatgaaccatatattgattgccatattattagcgttaacagcgatgttggcgaatgctgaatatttatttggatcatcaatgttatcgcgaccacttgtgacgtgtaccattgctggattaattatgggtgatatgaaaaccggaattatcatgggggcaaccttagaactggcctttgtggggtcattttcaatcggggcttcgattccaccagaaattatttcaggtagtattttaggaacggcctttgccattggtgccggtaagagtacagccgttgcgttaacattgggcattccgattgcatcgttagtgctagttattaagaatctgtgcttcatctttgttctgccatactttgttcataaggcagataaatacgcggccgagggtaattcaaagggcatggatcggatgcaattgttcggtgggttcttctcaatcaatttaccaatcggcttaatcgttgcaatttctttcatcgttgggagtccagtaattaagtcatcattagcggttattccaaaatttgtcatcgatggtttaggaattgcgaccggcttattaccagcttatgggtttgcgttattgttgaaattaatggtcaataaacacaatgcaatttactttgtattaggatttgccttagcggtttatatgaaagtccctgttactggggttgccatctttggggcttgtcttgcattggtattaactggctactcagctttcaataatggacataaaggcgagacagttgctgcaagtacaacgaatggaggcatcgattatgaagatgaagaattctagtttaatctcgaaaaaagatttgatgaaggttttctggcgctccttcacgatggaatgggcctggaattatgaacgacaatcaaatttaggctactcgtttgcaatgacaccagcgttaaataaaatctataaaggcagtaaagaaaaattaacgagcgcctataaacgacatttggaattttataatgtaacgccgtggctttctacatttccattagggatttcggtagcaatggaagaacaagcggcattagatgaaaattttgacacagatgcaattaacaatatcaagattgcgttaatgggtccgctaagtggcttaggggattccttcttctgggggacgttgcgggtaattgcgaccggaattgggacttccttagcgcttcaagggaatctgctagggccgctgttattcctgttaatcttcaatattccggctgttttagcacggtattacgggttattcattggctacaatatcggtgcgggcttcatcgaaaaagttcaaaaaacgggtttaatggataaactctcctttggcgcttccgtcttagggctgggcgttgttggatcgatggtggcgacaatggtgacgctgaagatgccattgacgattggtgcgggtaaaggtgcgccaactgttcaaagtatttttgatgggattgtaccaggcatcttgccattactctttacgctctttattttctggttagataaaaaaggcttgaaagcacactggattctattattaattgcagtaattggaatctttggtgcttacacaggtctactgaagtaggaggcagcaagcatgcaggatatgttgcattacattgaagcagaaccgaaaatctatgctgatatattagccaatcggcaaacgatattgcgtacgttactgaatgacaaatcaacggcatataaaaatgttgtgatttttgcaactggatcgagttcaaatgcggcgtttgcggcacagccttatatgagccagcaattgggcattcctgtttttgtcgaggagccatcttttacggcgaactatatgttgcacctgcaaccggatacgttgtatatcgccatttcccagggtgggcatagctactcaacgattgagatggtcaaacgggttcaagcaatcaacggccggatttataccatcactggtgatgaaaacagtccgattgccaagctaagtcagcatgtgattccactagggatgccaattgaagagatgccctatgtgaccgctggctatagtgccacgattttgacattaatgttgttggcgcttgaattgggtaaacaggatcaagcgagttatcaaacgaatttggcagcgattgaaaacattgtgactgacctaccacgcatcattgatgctgctaaagaatgggtagcgcattatagcgatgtgtttgatacagtacaacgcgtaatctttgttggttatggtggcacatacggtgtggcccgtgaaggtgaaactaagattacagaaacagtgcgtattaccgcactcggtaaggaagttgaagagtatatgcacggcccttatattggactccacgcaagtgatcatgtgattttcattgaaccaaacgggaagttacaagagcgagtcgctaagttacaaaaatttttaaccggaaaagtggcgaaggttgtccgaattacgaatggccaagttgatcgtcaagacgacctcggcttagcgttaccaactgatgagttgttagccccactctttatgactattccaattcacttattggcttataccgcatcagcgcgcaagcaaattaatctaaaagtgtcagcttttccagattttgatccaattacaaattcaaaaatataaaaaattgaaagaaggaaattgagatgttgaaatttaacggaaaagaattattggcaaacttagaaggcggaattgcactcagatcagacattaataaaattgtcgatcaaattaatgatgagggttatagtaatatttgttggattgggatcggtggcacttatgcatcatccatgcaagcggtcgttcacatgaaagaaagaacaaaaattgaaacattctacgaaaacgcagcttcgttcttaacaactggcaatctccgagtgacaaaagacacggttgtgattatttcttcagttactggaaatacgcaagaaatggtcgaagctgtcaagaaatgtaatgaaattggtgcacgtgtaattgggtttgttgatcgtgcagatgccgatttagcaacgatgtgtgattatttaatttcatacccattgaatgaacaacttaagttcttcatggtaggtgatcgctttatgtatttagcaggggaattcgatcaatacgacgaattctacaaacaaatggatgataactttgcaaaagatgttgtggctgtttataaaaatgcggacgaatttgctacagaatttgcactgaaacatcacgaagatgaaatgcattattttgttggggctggtaaccaatggggtgctacgtattcatatgcaatgtgctattgggaagaacaacattggctcagaacaaaatcaattgaagcgcaagaattcttccacgggatgttcgaaattgttgaacgcgatacaccagtcacaatttacgtgacagaagacagtcaacgacaattgagcgaacgcgttgctaacttcatcccacaaatctgtgctaattatacggttatcgatgcgaaagattacgacatgccggggatttcaccagaattccgcggtgcattatcaccatttatcttgcatgcggtcaatgagcgaattgatgtgcacatcgaagacttgaaccgccatccaatggaaattagacgttactatcgtcaattgaaatattaaaatggctggaggaacagagatgattggagttgtgatttgtacgcatggtgccgctggtagaggtctagttcaagctgctgaaatgatttgtgggcaacaagcgcatttagcagttgtttcttatgaaatgggggaaacgacagaagctttacgccaacaaattaatagaagttttgcatcatttgaaccactatctgaaatttttgtattgactgatattaaaggtgggacaccttttaatgtgatggttgatatcattcgggatgcgccacagtatcgactcgtatcaggtgttaatttaccgatgttacttgaattattcatcaaccgtgacaacttgggattggatgcattaacagataaaatattagcatctggtcaaaaggggatttatcaatacactgtttcaaatgaggatgctgacgaagatttctaattaataacaagagtcgtgctgtttaaaaatagcgcgactcttttattatgttttacgtgaaacatcctaagccattgttccacagaaatcccgaaaagttagcctaaactaaaatatttgttaattccattaaaatcatgtatgctgtagtgagaaaagttaggtttacctaaaagaatggaggctctttatgttatcagttaagaacctcaccgttgcttacgatgacacaccagtatttactgatgttgccgttcagtttgacgcaggcaaaatcactggcatcattggaccaaacggtgcaggcaaatcaactctgattaaagcaatattagggttggttaaggcacggcaaggctcagttttatatcaagatcgaccaatgcgcgcagttcagaagcaagtcgcatacgttgaacagcgtaaagatttggatttaaattttccaattaacgtttttgacgtggtgctaacgggcacgtatggcaagttaggcttattccgcgatccgggtaaaaaggcaaaacaagccagtcgcgcggcacttgaacaagtatcgctcagcgaatttgcgcaacgccaaattggccagttgtcaggtggacaattacagcgagttttcgttgcacgcgccatcgtccaagaagcggatattattattttagatgaaccgtttgttgggattgatttacagagtgagaccgcgatcatggcaatcatgaaacagtggcgtgatgcgggtaaaacaatcattgtcattcatcacgatttgaataaagtatcgcaatatttcgatgatttagtggtgatgaaccacggcatcgtcgattatggaccaactgaaaaagtttataatgcgcaaaacattgagcgtgcttttagtgcggacttatccgctgtcttgtttgatgcacaggaggtggcaaaatgacgagtattccagcttttattagtgcgttgggtcgttatgaattcttgcagagtgcgttgctgaccgccgtaatggtcggcatcatgtctggcattgtcgggagtttcatcattttgcgcgggatgtcgttgatgggtgacgcgatttcacatgcggtgttaccgggtgtcgcagtggcgtacatgttgggaattaatgtgctggttggcgcatctgtatttggtattttagcggcggtcttaatcggctttgtcgcaacacatagtaaaattaagacggatacttcgattggggtcgtctttagtgccttttatgcgcttgggtttatcctgatttcgatggccgaaagtgcaaccaacttacatcatattttattcgggaacattctcgccgtcagtgatagcgacattatgagtacggcgattgtcttaggcttagtgatcttattcgtctcattcttctacaaagaattattgattacctcgtttgatgaaacctatgcgaaaacatatgggttaaaaacgcaggtgctacattacggtttaatgttggtgctaaccttagtcacggtttcagccctacaaacggtcgggattattttggtcgttgcgatgttgattaccccagcagccaccgcctttttatggacggatcgcttagtgacgatgctcttcttatcggctgggattggtgctgtgtcagcaatcagtggattgtacttcagttacacattgaactgggcatctggtccggcgattgttctgatggcagccgtgctctttgccatttcattcatctgcgcgcctaagcaaggtttccttaagtggcgcaaaggaggacgaccagcatgaaaaaaatgattgtgacgttaattgcagtttttggtttggtgggtggtgtgtatggtttcatccagcaccgcgcccaatctaaacaacaacaaacgaaccagcagactaaattacgtgtagtgaccacgaattcgattcttgaagatatggtccataatgttggtcaagaccacattgaactttacagtattgtgaaacggggaactgacccgcatgaatatgaaccgcaaccgacggatatttcaaaagcgactgatgcggatgtgatttttcataacgggttaaatctcgaaacgggtggcaatggttggtttagaaaacttgttaagatcgcgcataagcaattcgaaaaggatgttttcgctgctagcaaaggaattcaggtgcaacatttgacaactaaccaaacagaacccgatccacacgcatggttggatttggcgaacggtattcaatacgttgaaaacattacgaaagcgctgcagaccaaagatccagcgcacgctgatgattaccgcaaaaatgcggatcgctacactgcacgtttgcgcaaattgcatactgatgcgcaaactaaattcgccgatattccagctaatcagcgggtcttggtgacttcagaaggcgcctttaagtattttggtaaggcctatcaggtcacaccggtttacatttgggaaattaatactgagtcgcaaggcacacctgaacagatgaagacggttcttgcaaaaattgcagattcagatgttaagcatctgtttgttgagagttctgtttcgccgaaatcaatggaaaaagttgctcaggaaactgggttaccaatttatgcgaaaatttttacagactcactcgcgcaaagagggaagcaaggtgacacttactatacgatgatgaagtggaacctagataagattcatgatggcttagtcggtcaataaaaagataatttttagcaattaaaaaagcgggtgcttagacaaaaataaatttgtctaagcacccgctttttttgtagttatccttgttgagaaagggaacggcgattggcgaagggaacgagccgctttttttgttttaagaaccgttgccggtagtaacgatattgtggtgtgaatggatgggaagatgaggcatgccatggcttttcgtgaccacagaagtgaacaagcgcaggttctttttgggtttctaagaattgttttttgaggtgttcagttggtggtgtgatggtgttcatcaaaatgtttgtttgggcattccacatagggtgaaggtgaatccaccgatcatgcaaaattgcatttaaagcatcttgatcgtggaagcgtaatttctcagggtgctgattgatgaagtcgagtacacggctgacaatattgtgttgacgccattttttgagattgagtaacatcacaccggagttaaagtaacgcggactttggtaatcgatagccattttttctaagcgttcgtggaacccagcatcttctactgcagcgaggaaggattggcctaagtcgatatcccatagccgggctaaatctgtgaggcatagcgcatcgcaatcgatgtagagtgcacgatcgaggtgagggaacacgtcgggaattagaatccgatagtacgccgtttttaagatccgatcactttcaacagtattggccagtaaagattcgttgacctctgcaaaggtcaagtcggcatcaaatcgagccacaacatgctgtaagactgctttatctcgtgcggtgaggtggtcttctaagacgtaaaaagcatagtgtcgatgtgagtcattgtgattaagaattgaggcgtatagaattgccagcgtttcgatgaaatcggaattgacagccgatacaatgttgattatatcggattgttgcgcatgtaattgtttgagttccttttgatattggtttaagaaggggtgactttttagagtgttccaaggtttctcgtgtgttgtgaagtgaacaattgccgggttggcgattgcttcatcaaataaatgggcatattcagtgttgataggcgtatgttttctaaagagcaatgagttttgtacgttccatttaggatggagtagtttcactttaccaaccaaagtggcatttagcgcatcttgatcatggaattgtaagcgatccgcatgatgattgatgaagtggaaagtccgctctgtgatggatgcatgattccaccgaaccgtatcaattagcatgacccctgaattgaagtagatgttattcgattgtggtggggtgatgccgagccgtcgcagtgtgagtgcttgtccaggatcaatcacggcacccacgatatttgtgcccaaaggcgtattgtatagcggcgtgagatcagtttgtacgaggatatcgacatctaaatataagacacgttcgattttttttcgcaacaaaagagttggcgctaaaatgcggtagtaagccgttttgttgatatggttgctttcaggacagttttcaaaaagctgcttattaagtgcaataaactcaacttgattggggcgtgggacgcgcttggaaacagcgtgtttcgtttgcggagtgagttcattatcgagaataaaaaaattaatagtagttttgggcgaaatatgggttagaaccgactttacggcgattaaaagttgatcaccatagttttcatctgcggcaaacatgatattaatagcgttgataataaccatctccttttaggtgttgtgtctttatttaaacaaattcaacaatctttgtaaaggtaaatgattatgctaacaataacaaaacgtaatcataaaagttgcatcaataaatgtgattgttttatattgatggtgtagcgttattaaagatttcatgaaaggaaggttgcttatgcaaaaagaagtccgaattaggaaagttaggttaggtcgtagtacagtcaagaccccagaattgtgcttggtgattaagaaagaatcagccaatctaaagtgttttctagaaggtatgactgatttggaggaagcaattttaagagagaataacggtgaggccctcgtcggtgagagctgggggccattggaatttgatcatcgtggtcgtgtttttagtaacaagacggtaaaaaggtgtcttcaaaaattggatgataatcaatgatcctagcagccaaagtggttgattagagaggatgagtcgatggtttcgcgcatattaccaattaaaaatggctacaatttcagagaactaggtggctatcaaacactggatggtcgctcgattaaaccgcatcgattattcagaacggggaatctggcgaatcttagtaagagagaattggtgctcttggaaagctaccatatcacctatgtcgtggattttcgttcaccaatggagcgcaaaaaagcgccagataaaaagattacgacggcatcttacgaatcgttgccaatttttaaagaagatgcgacgcaaagtacggcgagtgaagcggaactttatgagcgctacaccaataatccgcttggtgggcagcaacaaatgcgccaagtctatcgagaaatggtgcaagatccctattcaatcggaatgtatcgccaattcttcgaacgattattgactgaagccgatccgcaacaagcagttttatttcactgtacaggtggcaaagaccgtaccggaatggcggcttattatttattaaatgcactcggggcacctgaagatgtgatccaatatgattatctattatcgaatacagcatctagggaacacgttgcagcccgcattaagacgctacgtcaaaaagatgcctcaagcggctttttaaaaagtatgcatgcattgatgagtgttgatcagtcctacttaagcacagctgagcgcataatcaatgaggattatggttcaactcaagcctatttacaacaggccttaggattaacaacgcaggacattgaacatttaaaagcagtgtatctagattaattggaaaagagggaacaagaagatgggtaaaccagatttaaaagatccgcgaacactttatcggacagagccatttcaagaacaagaacaagctagtccggcattgcaagatcaaatgcatcccaagccagattgtggcgaagaacactaccatggtgcacaacggttactagatcgtaaagtgctgattaccggaggagattctggtatcggtcgcgcagttgcaattgcgtttgcccgagaaggagcagacattgcattgcaatatttgccaggtgaagaagtggatgcacaagaagtggctcaattggtgcgagatgcagggcgtaaaatcgcattgatcccagctgattttcggaaaccacagattgctagccaagtagtggaaaccgcgcagcagcaaattggcacacttgacacattagtcttaaacgcagctcaacaaattgcgcatccatcaattaccgaattaccaatagaacaagttcaagatagttttaacgttaatgtggttgcgatgtatgcgcttgtgcaagcagcattgcctcaattaccggctggcggcagtattctgacgaccacttcagtgcaagcctttaatccgagtccgcatttgttagattatgcagcaacaaaagcagcaatcaagaattttacgatcaatctagcgcaacaattagcggataaaggtattcgggtcaacggggttgcaccaggtccgatttggacaccgttgcagttggctcaaggacaactggaaggggctttgcctaagtttgggcagaatacattgctagaaagagccggccaaccggcggaattagcaccgctatatgtttttttagcaagcaacgcagcaagctatattaccggtcaaatttacggcgttaccggtggcgaatcaattaattaaacaagtgcatttacgataatttaataatattgataagcgtattgttttacggatgctggttgaatttgttacatttatggagaaccagcaatatattttaaggaaacaagaaaggatgattgttatgttacattggttatgggttttaattattggcgctttaattggggtgattgcgggggcattgacaagtcgtgatttacctgcaggttggatcggcaatatcgtcggtgggttagtcggcgcctggctaggccaatcattgtttggcagctggggaccacagcttgccgggatggccttaattccatccattatcggtgccgtgattgtcgttttcgttgtttcattattattcacacgtagaaaatcctaatacaaaggggcggacaccatgaataaattaactaaagtggtgatcagtttagccagtttgcttgggttgtgtcaggtagcgtggtttatcacattaatctatccactacaacaatccaataagcaatttatgcatcttagttggctacccgaacaatgggtcggtaattttggacttggattaggagtgcttagcggcttaattttcttatatttactgctattggcattattcagtccaccgaaaaaacgccaaatgatcatcaagaccgataaaggtgaactagcactttcccgcaaagcggttgaaaaaacagtgacacaagctattattgaaaaacaccgtgttaaggaagtgttagtccatacgacgtttaaaggccgacatccaaaagtgactgccgacgttcaagcggtcgcagtggatcgcaacgatctcgatcaacaagcacgggcagttaaagaaacggtacagcaagcattacaaacaatctttgagatgccgattaaagcagtgaatgtcaaactatcaccgctaagtaatcaggcaaaaagtgatgtgaggtgagacaaatgagacgttcttattggggctttgttgttggggcagtgttggcagccatttggattagttttggatttatgagtttaatcttgattatcatcgctggtttactcggctacattgcagctagtttaacagggtctaaggaagacctagaaggatttagatcacaagttaaccgggtcttgaagcaggataaataacggaggtgtgacaaaatggtagaacaagcacatttagatgaagtgatggccaatagcaaattgacttttgaagatgctgtaatcgccaaaattgctggtaagacagcgcaaaacattgatggcttattatcgatgaacggtaatttcttcagtgatattgcggatcgttttagaaacgatagtgatccaacgaagggcatcagtgtggaagttggcgaaaaacaggtcgcaatcgacatgaccattattttggaatacggccggaatgcacgggatgttttcgaacgattaacagctgcagtgactgaagctgtcgaatcaatgaccggtttgagtgttgtcgaagttaacagccatgtcagtgacattatgactaagaaagaatggcaacaacaaggcagtaatccaaagaaaagtgattctgaaaaacgcgttcaataaaaatagtaaaggatgatgaaaacgatggataaaccaaacaaaccaatggataaaatgatggataagacaatggatcaacataccgaaaaaatcgaaaaagaattgaacttctcggatggtgtgattgaaaaaattgcgggccaaacggtgcatgacatcgatggcgtcttagaattatcaggcgggatgatgagtcaattagctgatcgtttcagagaccaagaagatccgacaaagggcgtcgacgctgatattgataaccaagaagtaacgattgaattggatgccatcttggaatacggtaaatcagcgccagacatcttcgaacaaacaattgaacgcatcgctaaatcagtacatcaaatgactggtttaaacgtgacgaagattaaaatgaatgtctctgacttgatgaccaagaaagaatgggcagcaaaacaagattctccaaaagaagataaataaaaagaaggtatccggtgggccggataccttctttttgtatagattagtgttcaaattggtttaaatctaaatttaatgccgttgcgactcggcgaccgtattctggatccgcttggtagaactgtttgacttcgcggatttgaatttcaggttttgtaacttggccgagatttaagcgaatgttttcgattagtcgatcttgttcttcatcagttagtaagttgtaaagcttatcggctgctgaatagtaatcgggatcggctggatagttaccggtttgaccgctaagttggtcgccatgaattttggcagatgggacttcttttggaccatcttcactattaggttcatagttgacgcctgtctcttggttttttgccatgatcccgtcgcgttcgtaattatgcacgggcacttttggccggttaacaggtaattgttcatagttggcacctagacggtaacgttcagcatctttataaccgaacaaccgtccctggaggagtttgtcaggggaagcttcaatcccaggaactaagttagcaggtgagaaagccaattcttcgatatcctcaaagttgttggttggattttcatcgagtaccatttgaccgatttcgattaaggggtaatccttttgtgaaatgaccttcgtcacatcaaagatatcttgcggatagtttaaaccagcttcataaggaacaagttgaacggcaacggtccaacttggatggtcgcctgtttcaatcgcatcgaataaatcattttgtagataatctgtatctttaccagccaattcggcagccagttcgttacttaagttatggacgccttggtttgtcttgaagtggtattttacccagaactgctcaccagcagcattcacccatttaaaggtatgactaccgtagccatgcatcatccgataactagcgggaatcccgcgatcactcattaaaatcgtcacctgatggactgattcaggtgaaagtgaccagaaatcccactgcatgtcttggcttctcgcgtgtgttcgtggatctcgtttttgggagtgaatgaaatcagggaatttcagaggatcattaacaaagaaaacgggcgtattattaccaacaatgtcatagttgccttcttcggtatagaacttaagggcaaatccacgcacatcacgataagtatcgggatagccggcttcaccagctacttgtgagaagcgcgcaatcattggtgttttcttaccagcaccactgaaaatggctgcctttgtgtaggcgctcatatccttagtgagttggaagtaacctttagcaccggcgcctttagcatgcacgacccgttctggaatccgttcacgattaaaatgcgcgagtttttcgagcaattaataatcctgaattaaaacgggaccgcgttgaccagcagtttgcgaatgttgattatccgcccacggttggccctcattagtcgtaaaccgtcatgttatctgctgatgagacgcggcttaatgtattgctggtataaataagcagcccccaaaaagtaactagttgccagtaaagtgacgagcggcaaactttgaaacatttggtgtgggagaataatggccaataaagggaaggcgtaggcggcgggaattctgacttgtagcagatagagtaatgcccaaactagtggcagtgcaattaaggttaccaataaccgtgaatcaagtaagctataagcgacgaatccgattgtggcggcgccagttaatgcaaccatctgcttgatggccattttacctggatacattggtttttgtagaatttcaaaaaagacgacaagtaccggcggaatggcagccatctgtggccggccgagtaaactaacaactaacacccataagagtgcaatgattagaaaaaccagcatgacgcgatagttaatcgtggcatgatagggatgttgcagatgcaatttgcggaggctaacgaccaacatcaaagtgagcgtaaagcctaaaattgcaatgatgaatgaaagttcagtggcgttgacgataatcggtaacagccccgttgcaaacgatggtgcgagtgttgagcgaaataaacaaagtaaaacaatcatgatgagtagtagtaagctaattttaactgcataactgagcggcaaccgattaatgccaaacccaacgatggcggttatcgatggcagccaaaatatcttggcgggttgattgagccaacccggttcgtgataaatccacagccccgttgttaaggctgcgatttcgggtagaataatctcaacatcgttcaagacagtggcaatgccgaccatcaataatacgaatccaaagccgagtaagtaatccgatagttttaatttttggggtttcaaaagataaatgcctccttagtgtggtttgagtaatagtatttattatacgctactgaaaaaagaggacaactcaaaaaagagcgtttcaactaacgaatagctgagacgctcttttttgaattaaataattattagtcgttcaagttatagcgtaatttcatgtgttctgagcctgaaatcaccatttggccaagtagggctgtttggcgtttaagtgattcgctagctagtttgttattagcggcttccaagaaggctgcagcgtctttttgatcagcgaaggccttgtcggtttcgttttggatcacgtgataggcactcattgcttcgagttcgaaggtgttacgcatatcaacgtagaagtcgtaatctgtatcgccaagtaaggcggttgtacaacttaaccagtacatattgttcaagtcaaaaatacctgtggcattcttgtatgattctggtgtgtcgttgatattcgtgtagaatggcacgacggtgttaaacgtattggcaccataagctaaccattgaataccggcaatttcagcaggcacgttgttgcgcacttgtaaaatatgcacgttatgattccggttaattccgattggccggaaacgagttttaacatcttcaggggcgctaccgtaaggatcgtattctgtattttcaaagtgagcgctcaagacgaacttgacgtcttcgattgaaatcttgcggttggcatggcagatgaatggtaaatcttggtccattggatcttgtttgatttctggattgaagtattgttgaccgtaccatgttcgtgggttgttataaaccgtatctttgattgaagcactgccgaaaatatgacggagattgtagccttcaaagtctggattcaagtggttatcatcaattaaagcttttaaatcagctgagcaaagcgtgtcggctgaatcaaagtcgaaatgattgatgttcatccggttaggggcaaccacgtatgcatcatcagggatgcgaacagcagcccagtgatgaccaccgattgtttcaagccaccaaacactgtctttgtcagaaaaggcaatcccgtttggttcgtatgtgccgaattcttcaaggagggcgcctaaacgttcgaccccttcttgagcactgtggatgtaaggcaagactaatgtcacaatatcttcttcaccgatgccaccagggacaaaaggatcaagcccttgaatccgggggttagtggtaatcgtttctgtggcagacatcgtgatgttttcactgttaatcccagcagctggccaaatcccgttcgtcaataatgagttaggaattgaggtatagcgcattgggttatcaggcaattggatttgaacgccgctaatcaccgcttgataattccggggttggtcttcaggattgaccacaacaaagcgttgtggatccaaagcttcgtggccatcatcatttctagaaatcatggttgaaccgtcgatggaagcttttttgccgactaagaccgtggtacatgaccctttaattggtttttgcatgtcaaaacactccttttatttattatccatagtataacgcttttggcgggaaagtgggggattgagcgataatcatgtgaaggaattgtttaaatgcaagtggttgagggtgccaagtcagttatcattggtattcaattcgttggtatcaacaaaaagattcggatgggtcgtcaacgtaaagcacaacatgcaactaatagggctgaacaacatgccgaaaagaaggccatacaatacagccgttttcagcaacaccagattaagaagcgggaaaaacatcggagacattgaaaaagaagaggtgggggtaatccgcatctcttccttttaatatcgtcagacaaaatatgaagtttagttaaataatgatatactcgatttgatttaaaggaaagaggggactaatgctgaagttagccgattgtttattagtgattgatctccaaaatggtgtctgcaaaagtgagcagcctgttgcgcgtcttaatcaattaattaaaggcgttaatgccagaattgatgcctatcaggcggaaagtcgcccgattatttttgtccaacataacgataagactttaattgctggtcagtcgacttggtagataatgccagaattgaatgtgcctaaaacggcaatctttgttcaaaaaacgcatgcggattcattttggcagacaaacttacaaacgttattgagccaaatgcaaatcaaatcgcttgaaatttgtggtgcccagaccaaatactgcgtcgatacaacgattaaagttgcccaccatttgggctaccaactccaaatggtagctggtctttcaactacaacggacaacgcctatatgacggctgaacagacaattgccttttacgaaaacgtttggcagaaccgttttctagaattactaaaataaacggtaatctctggtacaatggaccttatcatcacttaagaggagtatctattaatgtcaaaaacagctttaattacaatgcaaccaacagaccaaacgacagggacaacggtcatttacgcgccagataatgcggccaatcgtgtgtaggctgctaaacagtccaacgtacaactgatttcgattccaggttatgttcgttttggcgatcatatcgttaattttttcgttaaaaaaattgtgaaacaaggcgatgcttcggcatacagtaatatgttacagtttgtttatttttcacacatgatggcttacaacgtggcaaatacgccagttgaaagattagtttttgcaacgcaagatctagcgactaaagtattgatgcagtttgataatcaagcatgttataataatcaaataacagtcttagccaaataatatagaaaagccccgctcatctgagcggggcttttctatattatttttataagttaatgatttgtgcaacctcaccgtggtgtccgctagttgttaggggggcattaacaccgctgatatcgtctatgttggttacaatcaccatactggttgcttctttacccgcagaagcaagcgcagctaagtcgatttcaactaataactggtctgttgtcaccggatcgccttcttgaacgtgaatggtgaacggcgcaccgtttaattcaacggtatccaagccaaggtggagtaataattcaacgcccgttttggttgtaatcccaagtgcgtgttttgttgggaaaacactagagataataccgtccactggtgagtagatatgactatcactagggtttactgcaaaaccatcacccatcatttttgttgaaaaaacggcgtcggttacttgtttgagcgggatgacgggtccatctacaatagcgtgtaattcgagttctttgggtttacgtgagaatagtttcataatgatgactccttctacttagtaaaatattcgctgataacgttcgatgaatcagctaattggttcgtattagcggtgaaatcttgttctaagaaactgtaatagagtaggtcgacagcgtaaagctgtgcaattaatgaagtcgttgccgcgcttcttagctgactgttttcagtactatcatcatgctgtaacgtgatggttgctaactgtgcgatttgactttgattattatgagttaaaacaataattggaatattaagttgttgtgcaattttagcaagttgcagaggctcttgtttttcgccagagttagaaattaagataagtgctgcctgtgttttctgtgtggttagtgctgctgccagtagatgcgtatcaagtgattgaatgacagatttaccaacgcgcagtagtttttgttgtaaatcctcagcggcaacgtttgaagcaccaagcccataaatgaaaatggtttgtttcgagtggagaatcattgcggattcttcgagcgcgtcattcttgagccgatgattggtttcagtaatcgcttggttaattcgaaaagttagtttattttttaagtcagttgttgtatcggtcggattaatttcatcgaagagccgttgatcggtattcccttcagatgaaagtcgtaatttgagtgctggaaagccaccttgaccacagagtgttttaccaaagcgagcgacagtcgctgcactaacgttagccgcttttgcaaacgcactagttgtcattgtcggtacttgtactggatgggcaagtacgtattgagcaagccgctgttctgttttggttaaagttgggagtttcttttgaattgaaaaaagtatgctttccataaaatcagcgtcctttaaaggttatttttccattgtagcatctttgggaatgccaaagaaataagttgcgacaaagccaccggcataagctgcgagcaagcctaagatataagcgaattgatggccgtttgtaattaaaggaattaaggctaagccactaggtccgatggcaatcgcaccaacgccgcccattgcaccaatgacggcaccgccaatcccaccaccgatacaggcagtgatgaatggtttccctaatggtaaagtaacaccgtaaattaacggttcgccaatgccgaggaagccaacaggaagcgcccctttaatcatatttgtgagttctttattcttacgacaacgaatccaaagggcaagtgcggccccaacttggccagcaccagccattgctaagatgggtaaaagtaaagttgaacctgttttgttgatcatttcgatatggattggtgtgaggacttgatggagcccgaacattaccattggtaagaagagtacaccgagcgcgaaaccagagaaggcacccccgacattcagaatccaattaattgagccgacaagtgaatttgaaatcacaccggctaccggcataacgatgaaaattgtgaagaccccaattaataataatgaaattgtaggggtgacaataatatcaattgaatctggaataaattgatgcaatttcttttcaaccaatgagagaatccaaactgcgaagatgacaccgataatcccaccttggcctgcagataaaggatcgccattgaagatattgtgtaatggcaacttaggatcaacaccacttagaagtgtaacagcaccaatgacaccacctaaaccaggagttgcaccaaattctgtggcactgttaatcccaacatagattgcgagataagcgaagacgccgtttttgatgacgtttaagatggtaatgaattcagaccagtttgaaccaagggatccagcgaccatcatgtttgatagaacggcggcaattcccccgattaaaccagcgccgacgaaaaccggaattaaaggaacgaaaatatttgaaatcgactttaagacccgcttggttggcgtactcttttgttttgctttttgttttgccttaacttcagcggcttttgcttcgactttttcgcggtcggtcattgttgcggctgtggcagttgtggtgagattttctgggaagggttcaccaagtttaacaccgacttggtcgaccatgatttgggcgactttattgacaatcccaggaccaacgacgacttgaagcgtgtcttcttcgacaacccctaaaacgccatcgattgcttttaacgcagtcatatcaacttgatcatcgtcacgaattgtcatccgcacacgtgtcatacagtgaattaatttagcgacgtttgcgggtccgccaacagcggcgtaaatttctctggctaagcgtacttcttttttttcagtcataatagtgcctccttaaggtttgttattgaatagtttgacgtacaaaaccgtgtgcttgtgttaaacgttctttggcttcattagccgataaatccgttaaaatcataacaattgcgagtttaacgtcttcgttggcggcgctaaattgggttgccgcaacatcgtaagtacaatcagttgcagccatgatgattcgtttggcacgttcaactaatttttcgttggttggtttcacgtcgaccattaagtttttgtagactttaccaattccaatcatcgaagcagttgataacatattaagcaccaatttttgagcagtacctgatttgagccgggtcgaaccggttaaaatttcaggaccaacttcgacttctatattaattgtggcatgttggctgatgagggcatcgaagttgcaagctaagctgacagtactggcaccaatttggttggcataatcaagaccgccgatgacatatggggtccggccgctagccgcaataccaactactgtatcgttagcggttaagtggattgcttccaagtcttcgcgacctaatgtcggtgaatcttctgccccttcaacggcaacggtcattgcttgcataccaccggcgattaaaccttggaccagttccggttctgttccaaaagtagggacacattcggcggcatcgagaacaccaagacgaccgcttgttccagcgcccatataaattaagcgtccctcattttggaaactttgaatgataacttgaacagcagcttcaatattggggagtgcttgtttaacactttctggcacattgtgatcttcttcgttcattagtgtgagtactttttcaattgaaagttcgtccaattgcattgtcttttgattacggttttcggttgttaaatgacttaaatccatattaatcaatctcctttagttggatggcttgtccagcctgaatgaatggcagtaatgcgtgatctttttggatgacttttccaagaacgttaacacgagaatctgcgggtaggtcatgtttggtaatctgtaactcgcccatataacgtccatagtcttggttatcgagggtgatgctgccacgtaatcgtactgatgtctgttcaggttggattgtggtctgacaaagtggccggccttcttctaatctgatgacatcacgggcgacatcgcgccgattatggaaatgttggttaaaaagataaggggggcagggggctgacttaagcatgtacaaggttatgacgtgttgatggtagaatgcatcaaattgcgctagagtggtttttgctaaagttggatcaccgatgaagaccttatctgtttcacagttgaataaatcgagcgcactagcaagcggatgctgataacgatgggcttccaaagtgggtaatccttcttcaagtggtccgcgtaaaatgccatcaccaggaacaaaagcttgaatggttaaaccttgcgttttaagccactgatttttttcagtaaaccaggttcgttctaaaccggtttcatttctagggtaataattatgccaagcttctatgttagcgaagttggcaccagctgcgcgtaaaacggctaaatcttgttcggcaattgtgcttgcgttgagggcaatcttcaaatattgtgataacttagcaatggttgaattatcgatgccgaaatcaattcgcaaaccagtaatcccaaaggacagtattgcggcgggatcgttaagtgagagaccaactgctggtaatgaacttgtttcaatatcaatcatcaattgtaagtgttcttcgcgacacgcagtgctgagtgctttgattctagcagtgtattgtgaaatgtcatcttcaggaatatgcatcgacgtgaagacttctgtgaagccagcggcgtgcattttttgaaggttcatgcggtttgctgaggtgaacggttgattaagatagatagaaaaaccaaacataaagcaactcctttctttttaaagcgttttctatagatgcagtatagcgctaatgaaattaaatttcaataaaaaataaaaaaataaatatttagtgaaattaaattcataactgtaaccagtgatgaatgtaacggtttccaaataaccgtttacattttactaaaagtttagtaaaataagattgcgatctaaaagaatgcgtttacaggatagttcttgtacagattgatttatttgtatggtgtaaatagtaaacgtttactaactaaaagagaaagaagcgactaggatgaacgacaacaaaattattatcgatccagaccaatttgctgcagcaattatcgctgggaatcccaagcaaacgaatgaagacaataaggtttatatcaagcgtcaattgacgttatatctagaatcagttttactcgccaacgattttaattcattggaagaaaaccaattcggctcagccaaagaaaagcaacgccaagcgattttggaaaaaattatcgaacatcgctatcactagagtgcgtcatcaagcgggataacccgagggttgtgcttgatgaaagcatgtttacaatgaagaaactatcgaaaggaatctaaagaaatgaaaaaactaaaagatgttaaacagtatagttcttacgcttttggggcctttgggcatgacgccttttatgcaacacttagcacttattttatgatgttcgtcacgagtcaattattcgataccaaaaatgcaggctttaattcaaaaatgattgcgtatgtcacttatacaatgatggtcattcggattgttgaaattgccttcgatccgctgattggtggagtggttgataatacacggacgcgttgggggaaatttaagccgtggttactggcggggtcaattattagctctgttggcttggccatgatttttaccaactttggagggcttgcgacaagtagcccttatctttacttagttctttttgcaatcgttttcgtcattttagatatcttctactcgtttaaagacatctcgttctggtcaatgttgccagcgctgagtgttgattctgaaaagcggacaaaatttggggcgattgcgcgtttcggatccactttaggtgcacaaggggtcattatcgtgatcgtgccaatggtggttttcttctcgcaactattttctgggagtcatgggagtgaacaaaccagtgccgggtggttcggttttgccgttgtcattggccttgtttcattcttaggcgctttagcgaccatcttaggaaccaaagaagaaaagagtgctattcgggaaaatactgaaaaggttcggttacgtgacgttttcagtgtgattggtaaaaatgaccaattaatgtggttatctctttcatatttcttatttgcctttagttatgtgattacgaactcactgcttttatattattttagatatgtcatgggccgcgccgcagcgttctcaacggttggtgtgattactgccatcttagggattgtgtcagttgcgttgttcccaacattggttgctttaattcatcgccgggcaatctatattggcggaatcgcaatgatgatgcttggttatatcctcttcttgtttgctggaagtaacttggtcgtagtcttaattgcggtcggcttattcttcttcccatatccactggtctttttggctgctttgatgacgattaccgatagtgttgaatacggacaattgaaaagtggtacacggaatgaatctgtaacattggcagtgcgacctttattggataaactagccggggcttttgcaaacggcgtcgttgtaacggctgcgattcatgctggcatgactgggaatgcgaaaccaagcgatatcactaacgcggggttgttgcaattcaaaatgtacatgttcttcattccaatggcgttattggttatttcagcgttaatcttcatggctaagattaaattaacggaagcaaaacatgctgaaattgttagtgagttggaacggaaattagattaataacaaacaaagcgtagttagtctatgcttgaaccagaggctgcatcaaaagtaattttgatgcagcctttttatggctgattagtttatgggcttaacttgacgctgagaatgccgatgacttcttggttaacagtgcccaattatttgaaccagtcgtcggtcagtcggtagattgggtgctattcagaactaaaatcgaaagagccggcggaacggattctgcttttggtttgactgaagatggtgactatcaatacaagacggcaaaagggcttttttagactactattatcaaaatgtcttctttcaatcatgtaataaattgtatcgaagagcgattattgaagctgaagcattgcggttcgatgaatcgctgcgtatcggtgaggatttaattttcaacttgcagtatttgcaacattgccgagttgttaggcatcgggcagcgtttttatatgtttacgagatagggcatgctgaggcggctacgagtaccctaaagccgcagtggttctcagttaacttagcagctctgcacatcattgagacgcaattagtggctggaattgcagaagtggatcgcgcagcttacacacgatttttaaagcagtatgtgcggaccttttttagaatgttaattgtttttgatcagcgcacactgactgttcctgagcgacaattcattcagacgcaattgatcaatttagaacgtggtttaccaaccggcacatcccggtggctacgatggcttaatcggtcgcacttagcgccggtcatgctagttggcttacgtcggttaaagcaaaggttaaaataaaatgctgtccgccagaatcgaacgattcaaaagggggacagcatttattggttcatatctaaaaaaggatgcggtgggcgtttaaacaaaggggaattgactgtgaaaaagatcagtatcgtgattgtaatcagtagtattgttgtgattagtctggcggcgctaggtttttatttgcatcaagaggataaagctgttgatgcgattaaaaccgggtctagtcgaatttcaaaacaaattgatcagcgaaagccaatctcgttcctattattaggcgttgacacaggcgcggatgggcgcgttgatcgtggtctgtcggattcgatgatggttgcacttaacccggcgtaagaagcaacggtggtctactcgattccgcgtgattcattggcagagatggcagatgaccacggcggtaatattcagaaaattaatgcggcttatgaaattggcaaggctaagatggcgaaaaaaacagtcagtcagtttttagggctcccgattgactactcggtgacggtcgatatgggcgcactcaaagaattggttgattttgtcggggggattaccatcgatacggtgatcgacgttaatttgaatggacaagtgattccacaaggccaccatcatctcaatggtgatcaggcgcttgcttatagtcggatgcgttatcaagatccgcgcggggactatgggcggcaattgcggcaacaagaagttttgaaacaggttgcgcaaaaaattcaaaagccaaaatatttgatgaacattggtgacttaatgactaagcttggtcagaaaattagcactgattttacagccgaccaagtgaagcagttgattcgcaactatcatcaaagtagtggtgaaattgtcagcagccaattgctaggtaaaacggcgtggcttaacggcagtacctatcaaatcattagtacagaagatttgcaggctgcttcgaatcggctccgtgaaaatttagcactgccggaacaaacgttaaccaataccgaaacgcgacttaatgatatgaacccggccttttttgatgatgagtcgccaacgacttacttcaacgtgcgcggatataacgtgacacggtatacaaataatacggattagtgttgtggtcgaagtgcgtaggtttgggtggcgatggcgttaacgaaatcaacatcatgctcgataaataggagggttgggcgttgctcggcaattagagtttgaacttgttcacgcgtgatgacgtcgaggtaattcaacggttcatcccagaggtaacagtcagcctcttcacagagcgaacgtgccagtgcagctttacgtttttgtcccatgctcatcgtttctagacggtgggtaaataaatcgcggtcaaaacccagtttgcgtaacatgcttagcagttgttcgtgatcaacctgtttcgcagcagcgaagtcggccagtgagccgctcagttgatcgaaatcttgtggaagatacgagagggttaagtgcggattaaggtgcagactaccgctggcaatgtggtcagttgcgggtaatgcaagtaacgccttaatcagtgttgatttacctgcgccattaatcccagttagggcaacctgttgaccagtttctaaggtgaatgagagtggttgattaaggatgacgccgtcttgttgtaagacaagttcatcaacactaagcacattttgaccgggtttgaggggtcgctgattgatggtcagtggtgcagcaatttcaacgtttttaaaaagttgttgttttgcttcgattgcttcttccgcgcggttggcaattgtcgtcgcccgtttcataaccttagcggcgcgatgactgatgaagcctttatcgagattggcactttcagttttgacactggcggcgtttttccctttttcagcttcgtgggaccactgcgctttttgttgtgctgtttttgtcagccgtttgatatcgcccttgagttgttgattctgttgttgctcataagcagcttgttggtcgtgggcggtttgccaagtttggtagttgccttggtgaacggtgatgtcggcacgattaatcgctaggacatggtcgatcacttggtttaagaaatggcggtcatggctgacgacaatgaagccggctttttggcgtaaataattggcaacgacttggcggccttcttgatccaggtgattggttggttcgtcgatcagttgaaaatgatagtcgtcgatgaatagtaaggcgagtaacattttggtttgttcaccaggacttaacgaagcaaatggttgccagacgatttcgggtgcgacttgtaggagccgcagttcccgctcgacttgccagaaggttgaattgtcgaggttacctagctgcattagaatatcgtgtgtgagttgcgtaggttctgtaacagtctgtgggaaatattgaaaatcgagattggtaaccaactggccatcaaatggtagttggtgttgaagtaattttaataacgttgttttaccgcgaccattgcgcccgattaaaccgagtttccaactggcgtcgaattgaagcgtgacgtgatcgaacaacggttgtgtttgatctgaatagttaaatgtgagtgctttgaattgaattgtgcccatgaattatcacctcattgattgaatgagattggcccagttgtcgttaaaaatgcacaaaaaaagacgcaataacagcgtcttttaacaagtctttaggtaactgacctgaaaattaacgcaagcaatctctaacggcaatcggaaataaacggtccacgcacgtgcatgaacagttcgtaccaatcgagttgtcagaaaattagcatgcgattttcaatgccagtcacatcctttgaataagttaaatttgattctagcagattatttttagaaaaacaacttttaaaataatcctttacaaatagatggttatcccctatactaagtaactaattaataacaaggagggtctgtcatgaattcaatgcaacgtgttgcctttagctttttctttaagatacccagtaatcgactggttgattaaggagaaggcatttgagttgaaatgacaaaccttaatgaattggaagatggctgggtaaccccgagtcatcttcctggtggggctcactagtgaagactagtgggctcctttttttgttattaaatgagtgcgacgaagcctggtaggcggcgagtaatcgcctagtcgagtgcatacaataaaaataggagtggttaaaatgggattaatggcaaagatgttacgaaaagaatcactggaacgttatttacaacaagatcagcggttggccaaaacattaacggctaaggatttaattgcattgggcgtgggggcagtgattgggaccgggatttttatcttaccgggaacgattgcggcgttacatagtggcccggcaatcacgatttcatttatgattgcggcggccgtttgtgccgttgcggcgatgtgttacgccgaattttcatcggcattaccagttgcgggaagtgcttactcatatggcaatattatttttggtgagttaatcggttggctgcttggctgggctttattcttggagtatatgttgtcagttgcggcagtttcaactggttggtcggcttattttgtatcatttatcgaagggtttggcatccatattccgcatgcaattactggcccgtttgatccggcacatggcacttatgtgaacctgtttgcgatgctggtagtgggcttgattgcgacattattaatgcgagggactcgttcatcaacacgaattaataacatcatggttttgattaaattaggcgtagtgctacttttcattagtgtcgggattttctacgtgaaacccactaactggcaaccgttcatgccgtttggggtaagtgggattttcaaaggggcatcactcgtcttctttgcttaccttggctttgactgtgtgtcagcatcggcggcagaggttaagaatccacaaaaaaatcttcctatcgggattattgggacgttaatcatctgtacgttgctttatatattagtggcgtttgtcctcacagggatggtgtcgtaccgcgaattggacgttgctaatccggtcacattcgcgctacaagtcgtccatcaaaattggtttgccggtctgatttcactcggcgcattagcagggatgttcacgatgatgttgacgatgacttacagcagttcccgcctcatctattcaattggtcgtgatggcttattaccaaaagcacttggtaaagtgactgcaaaacatcaaaccccaactaacagtatcaaaattgtgacggtagtcatcatgattctaggcgggttcgtttcactggatcaattgactaatttggtaaacatcggcacattggtggcttttttctggatgtcgattggggtcatcccattgcggaagcgcaaggacattccgaataaaaatgggtttaaagtcccattttacccagttttaccgttaatatcaggagcgctatgtttattgatgatgtttgaattgccaaaagtcacttggattgcagcggcaatctggtttgtcatcggcttagtggtctactttacgtatgggattttcaatagtcgcttaaataatgattaaatcagcctcaaaaagctgacgttcacccgcagaaacgctagaataaaacagaggtgacgactgtggtaaaacataaacggctgtggattggtctaataggaagtgtcatctgcgtcctcggtgtattagggacgtatttcgatgctggtttgtatcagcaaccgattattcgggtaacgcgggtccagacaattagccgtgagaaacagactgatgagtaccaaaatgaagatacagaagtagtccagcgggtcacgggccaatttttgaacactaagcaaaaagggcaagtgattacgctacgcaatacgtatacggcgtcgcaagcgatgtcgacgcggtactataaaggacaacaagtctttttacaccgtgatcaatatttgaaaaagtggaccttaaacgagcctaagcgcgatacaatcatcgttggcttaacactgttgacgtttagtttcctattactaatgatgctcaagcgcggattgatgacgctaatcagtgtcttggtcaatctcgtcgcattcgtcttaacactccatttaaacgcgatgacgggtggacggtggttattgccgattatgtgtggcttagcggtcgttctaacgggtttaacgctacttttagtattaggactcaaccgccagatgcttgtctcatatggcgcgacaattggcgcaacgttcctagcactgtttctcagcatggccgtcttgaaattaaccggcgatcaaggcttgcattatgaaacgatggcctatgaattacagccgtataaaacggtcttcttagcggaagtcgtgctcgggattttaggcgctgtgatggatgagacgaccgatatttcatcgtcactccagcaattagcgattgaacggccaaacgttacgaagactgaattgtttaaatcaggactcgcaattggtcgcgaaattattggtccgttagttaatgtgttgttctttttagtcatggcggatgcttttccaattattttattgtatctacgcaatggcaacacaattgcgtataccttatcgcgaactgtcacgttaagttttacgcagacggtgattagtgcgattgggattactttggcggtgccagtaacgagcttgttggcaagccagttagtgcgggtgagacgcctatgatgttgctaacgggaattttactgatcttattagtgctggtttgtggttggcaagggctgacgattttcttcagccttggtttgaattttgtcgtgattatattggcactggtcttggtggcgggtgggtttgaaccgctgattgtgagtggtctgttgagtctgattttgttagcgacatccatcttcatgaataccaagcagccattaacggccaagacggcgtttgtgacgtcgttaatcgtggtggtgggcttgctgatcattattgtgcccctcagccagttagcagctacctacggctttggtgcggaagatgcagaagagattgaaggctttggactcgcaatcggcttgtcgttccaaaaaattagtatcatgatgatcattctgggcagcttaggggcaatcgccgaaacgagtattgcagttgccagtggtttagtcgaaatcttagaatacgacgcgcaaatgggctccaagcaactctttaaagcggggattgcgatcggtgaaaaaattattgcgacggcttttaacacactgttctttagttttttcggtagcttcttgtcattaacgatgtggttcattcaactcggttatccaattagtaaaattgtgaaccataaaattttaattggtgagggactcgcactattaatcggagtgattggggtcatagcaaccgttccgctgaccagttggctcctaaactatttcagaaaaccaaaagacgaataaagttaacttgaaaaataagtcaattcagattagaataatagaatatatgcacgaaaggaggaaacgcgcaatgtcacaaaacttacatgttagtgtttctggtaaccgtcgtcctgttaaccaaaacaatgctaaaaaacgtaacgctgaaacagctgctgtattgaacttcttgaaggaacgtaaatcagctaaataattataatgaatttttttcaaaataatgttaaaagaccatctaaaagtcgcttgaaaagcagcctttggatggtcttttaatatggaaaataaatatattttaaactaagtttaaccacaaaaaaagagctacatcctaagatgtggctctttttaaatacatatttttgattaaaggacgcgaactgcgaatgaaggcatgaagtagcttgagatacttgctgtcttaactgattcgccaggttgtggtgcgtggacgtatttgccaccaccgatgtagattgcgtcgtggtatgaagcaccagcgccaccccagaagaggatatcgccaggttgtaagttatcaagtgagacgcgttggccagcacgttcttgagcagttgtgacacgacccaatgaaacgccagcttgtgcgtatgcgtattgcactaaaccagaacagtcaagaccaacaccaggtgttgagcctccccatacgtaaggtgtaccgatttgtgataaagcagcgttgataacagtttgtgcgttaccacttgcttttgtcgttgtattcgtttgtggtgcttgttgagttgttgtagcttgagttgtttgttggctgctttgagttgtcgttgtttgtgtttgagcaggttgtgttgttgctgctggtgtacttgttgtagcagccggggttgttgcttcagttgttgcagcaggcgctggtgtttctgtagcaggtgccggcgttgttgcttgaggagcagctggtgcttgaacttcagttgtagtggttgttgcaacaactggtgtcactgcaggtgcatttgtaattggtgtgacgccattcaagttagggttgtttaaaacaacgtagctagcaggaacccaacctttgctttctaattggtaccaagttgtgccgtttaaatctttttgatcaatgacgtttttagttgtgccatatgttaagtattcgccagttggttgagcagcagttgtgtcagcccaaacagttgttgcacctgattggaagttagctgttactgtgttcttaacagcggttgttgttgcagctggttgagcagttgcatcgccggctgtaatgaattggcttgaaacccattcgtcattaccaagtttgtaccatgtttggccgtaaacttgttttgtgtcttggattgttacttgttggttagttgccaagtaacgagcaggtttttgacctactgctgggctagtccaaacggttgttgccccgtcagcgtagttaaccgtaccatttgttgcagcttgggcatcatttgtttgaagacccatcaatactaagccggcaaggccaaccattccagaagataagtaagtcattttttgttttttcatgtgtttgttgtgctccttcgaaaaatttttttaagttgtttgaattttgaattaatttagtacgctgattagcatagcatctgaaagtaacaaacatgttacataatagttagagcgctgttacatgtttcttaagatatcggcgattaaaagactaaacgtaagcgaacgtcaaaaaagtacgcatatcaagaagatagcgtactttttaggaagtgtcttaagattattggagtgtaccggtttgtgtctgatctgtaccggtctgagtattactttgtgtaccagtcgtcccggttccggttgtggtatccgttgtcgaagtccccgtcccagttccagttgttgcaccagtgccattccccgttgccgtgttagcagcatagcctgtcgtagtttgtgtattggtagctgtgttttggttagttgttgcttgattagcggttgttgtgttttgcgtggttgccgcttgggtattgttagagtaagtgttgtattgattttcagcgttcttaacatacgccaagtacttttctttaaagccgtcatgggttgatttattaatcaaagctcggacataagggaagtcgctagcagataggttagctggaatatgcttgaggttgtcgtctgtaaataagttccggacagctgccatagccgctaattgatttttagcttcttgataatcagcaagttgtttggggtggtcggtatagtccgtttcttcaccaagttgtgcatcggctttgacaatcccatctttatcgaaaaaggcgcttgttttaactttgttctttttcttctttttagcaggcttttcagaagcaacactttcagattcactagttgctggttgcttaccagtaatcttatctagatctttttgggcagccttgtaatcagcctttgcatcagcgctaattccgctcatataaaggttgggcgtgatttgtttgtcgagtttgtcagccgcagtgataatttggtgttgtttattggctgttaacttcgcaggatctttacgggaaccatcactatagagttggttcactttttggacgtattgatcaattttttcttctgttttagttgcggcagctggaatttctgttttattctgacagccagctagaatcatgaaacagctggtcatggtcagcaacagagcaagtgttaattttttcattgagaaaccaccttgttgttagttattcatctaataatatatcatgaaattaggagcgctaacatggtcgtttgacgataattccgaaatcggaaattaacgtgaaatccaatattgtatagaaatcgcaataaatgcgggggttaaaggaaattaatcaacaaatcaggctatactttcgcaagtgagaagcgtacactatggatattaattatgagaaaattttaatcaaacgtgaccgatgagttcaattaaagtggtcatcagagggagtgcaacttatggaatcagcatgtacatcaattttagttggtaaaaacgcatcattggacggatcaacgatgattgcgcgtaacgacgatacttttttacctttaacaccacaacggtttcacatcaatccagctgttaaagggcgtaagggtgctaaaattaaatcttggttaaacgggtttgaagccgaattacctgagaatggctaccgatggcccgctgttccgaatgttgattacaaacataatggttattatgatgaaagtagtattaacgaagttaacgtggcgatgagctgtaccgaaagtacatatggaaatgaaaaagccctcgcttatgatccattggtgaaagacgggttggatgaagattgcatgcaagctatggttgcgccgtacattaactcggcgcgcgaaggggtcagctatctcggtaatttgattaaacaatacggctcacccgccggcaatagtgtgctctttagtgatcacaatgaagtgtggtatatggaaattgtgacagggcatttatggctagcacaacggattccagatgatgcttatgcagttgccgccaaccaagtggcgattcaacaagttgatttcacggatgccgacaattttatgtgggcagaaggcattcaagaatacgttgaagcccatcatttgaatccggataaaacgggctggaatttccgccacatttttggcacgatgaatgaaaaagaccggcactataatacaccacgggtttggtacgcccatcatttatttgatgctgattttgatatgtcacccgaatcggctgaattaccatttattcggcgtattgaacataaaattagtgttgaagatattgaaatgttgttaggctcacattataatgaaacgccattcgatccaatggggcatgggactgatgccgacaagtatcgttaccgcccaatcggtttgaatcggacgcaaaatgcacatattttacaattacggaatgatgtgccaaaggaacaagcggccatcatgtggatcacaatggggatgccaacgtatacaccgttcattccatttttcacgaatgcgaacgatacggatctaagtttcagcgaaacaccaatgaaatgggatatgaagagtgcatattggttataccggacaatttcagtattggtggaaggccattatagccagtacattcaaggcaatgtagattacttaaaccgttgtaagcaagaattgcgaacgatgattgaagccattcaagtggaagcacaaaagtatcaaggcgctgccttaacggagtatttgactgagcaaaaccatgcgattgttaagcagatggcgactgaagcgacctcgatgattggggaactcgttatgtcgggcattaatttatcgaaattgacgttcaatatggatcgtaacctataagatgttattaaaagaagttattaaggatgaaaataattttatctttaatgacttctttttatatagtcacgacaaactaatatagtgggttgatgattatatggtcaattgaattgttgcacatcaaatctatttatagctatttaatgaatcgagtggtttcttttctctcaaaatatgctaatatattgatagcaaaataaattaaatccgttaattgtttctacgcatgacagatcggttagtaaagggagaaaaggttatgacagcaaaagcaacaagcaagtattctgatgattgggaagtagtaacgcatctttcattgatttatcggtggattgtcagcaatttaagcgactttgtcagtggagaaagtttaaattacaaagtttcttttgaccaatttttaattatgtacgaaatttcaactaacgaaaacttaacaggtagtaagttagctaagacgatgagtgttagtcgttcagcaatttcacgccaatgtcggttactgaaagaaaatgggtacgtggttgaagaacatcttcaaacagatcaacgggttaaatttttgagcttaactaaacaaggtcaagacgttttagaccggttggtgagccgctatgttgaaaaataccgtgaaatcgaagcacaaatgggccgtgataaagtcgatggtttgattcgattcattgatcaattctatttagatgtcattgaaccaagtgaataccaagataacaagatgggccgttcattcctaaataaagtaaagaaaatgaacgaagaaagtgcagaatagttattatgaaataggaagaaccgcgtgggggcggttctttttttatggataaaacgtgctttttggttgcaacaacttccgcttaatctaaactagcacttaatcttaaaatcgagattaagcgctagtttgtattaatgctcagttgctgaccgcaaccaaatgcattcttgccttaaacgtgctttcatcaataacttcctgtgctttgctacacttatcaaatcggcgattgcatcgccaattcgctaagttagataaatgctcagaagttacccgttgatgacgcactctgatataatagggcttgtttctttttatgaaattgcttacaattaagccatgaacggattatgaaagagtgggagtcgatatcatggaaaaaattctggctattaatgcaggtagttcaacactgaagtggcaattatttgaaatgccgtctgaacgagtaatcgctaaaggaatgattgaccggttaggcttatctgattctgtattcacagtgaagtatggcaatcaggaaaagtttaaacaagtccaagatattacgacgcacgaacaagcagcaacgttgttattaacgcggttgaaggaattaaatatcgtaacccatctcgatgagattacgggggttggtcaccgggtggttgctggtggagaagccttcaaggactctgcagtaattaatccggtcgggcttgatgagattaatcgtttggctgaatatgcaccattgcataatccaacccaagcttattacattaaaattttcactgcattattgccaggcgtaccggaagtggctgtttttgacacgtcattttacagtacgttacctgccgaaaactatttatacagtattccgcaagcgtattatgaaaagtatggggcccgtaaatacggtgcgcatgggaccagtcatcggtttgttgctcatcgagcggctgaaatgctagatcagccgcttgaaacgcaaaaaatgatcacgttgcacttgggcagtggtgcatcaattaccgcgattcaagacgggcacgctgtcgatacatcaatggggttcacaccacttgcggggattacgatgggcacgcgatctggtgatattgatgtctcattagtagcctttttagctgaaaaattaggtaagacaatgccagagatgatcacaattttgaaccataagtctggcttattagggatttctgaactatcaccggatatgcgtgatttagaagaaaccgctgactcacgaccacaatcccaattggcgcttgatatttttgtcaatcgagttgtgaagtatgtcggttcttacgtagctttaatgaatggagtagatacgctggtctttactgccggtagtggtgagaacggcagtgaattacgggctgccatttgtgaacaactcgcttgttttggtgtagaattggatgaagataaaaataatgtccgcagccaagaacgcattatcagcagtgatcaatcacgcgttaaggtcctgattgtgccaactaatgaagagttgatgattgccagagatgttatgcggttaaaataagggagttatgcaccatgccacaaaaaccactatcagaatatgaagttgagattccccgattgagtgctcgattagaagatacaccagccacaaaaacctttttcgacgcactaacaccaggctatcaacgcgaatgggcacgttatgtttacggcgctaaagctgaagaaacacagcaacgacattatgttgaaatgtgtcaaattttagatgcaggttataaatctaaacgaggatacggacaagcaaagaaaaaataaattaaaaaaagattaatcaggccaaatgcgcgccagattaatcttttttgtgttctttaataaagcggttacaaaaaagagttgaattctcaaagaagctcctttataataatcaccatgatagttagtaaaacgttttactagcctagaataaaggacggaggattgaatatgaatgctgtcaatatcttaattggattaatgccgatgattggttggggattgttccctgtgatcgttggtaaaattggtgggaaaccagcgagtcaaattattggaacgacacttgggacattaattctggccattattgtggctattttccgcgggacaccgattccagaaaccaaaacatttattttttgtttaatttcaggggcttgttgggcattagcgcagattatcacctttcatgtttttgaaaccatgggtgtttctagaacgatgccaatcacaactgggttccaacttgttggggcatctttgtggggcgtcttcatcttgggtaactgggcaagtacacaatcgaagttgattgggttcacagcgattattctaattatccttggtgtttatttaacagcctggagtgaagatcgttcaagcgctagtaaaaatggcgcggtgcgtggcatcttgttattattagttggcgaactaggctacctagggtactccgcctttccacaagcagtacacgcggacggtttccaaggctttttgccacaagcattaggaatggcaattgtaggtgttatcttcggattaacccaaaccagcaagacttatcaacctttcaaagaagcaacttcgtataagaatatcttcagtgggttcttcttcgcgtttgcagcgctgacgtatcttatctcagcacaaccttctgtgaatggcttagcaacggggtttgttttatcccaaaccagtgtcattttcgccacaatcggtgggatttatgtgttgaaagaacaaaagaccaaaaaagaaatggttgccgtattaattggtttagtactcgtattagtggctggatctgtgacagcctttatcaaataaaaagtggggcggatttattatgcgaaaaacacaagttatcaattcacaaatttcaaatgtgatttcaaacatggggcattttgatacaatgagtattggcgatgctgggatgccggtcccagctggaacgcaaaaaatcgatgtggccatcgaaaatggtgtaccaagttttattcaagtacttaaaaatgttctaacagaattggaaattcaaaaagtttacttagcaaacgaaattaaaacagctaatccagcacaacttgaacaaatcaaaaaagtgattggtgagacgcccattgaatttattgatcacgcacaaatgaaacaggacttggggcaggccaaagcatttgttcggacgggtgaaatgacaccttattccaacattattttagaaagtggcgttgtattttaaccattaggagggctttcaaatgaaaaaagtaatcgtattagggtcaacaaatgtcgacacaattttaaacgttcagcgttttccacaaccaggtgaaacattagcaatggatggccgcgcagttgctggtggtggtaagggtgcaaaccaagcaatcgcagctgttcggtcaggtgcgcaaacagctttcattagtaaggttggtaaggaaggcgccgctgatttcatgctagatacgttcaaaaaagatggcatgaacattgatcacgttcgttgttctgaaacagctgggactggccaagcttacatcatggtggatgctagtggacaaaatagtattttaatctatggtggggccaaccaagatgtgacagtcgatgatattcatgaagccgaagaagccatcaaagatgctgacagaattgtcgctcaattcgaagtacctattcctgcaattattgaagctttcaaaattgcccgtgcaaacggcgttcaaacgattttgaaccctgcaccagcgattaaaaatattccagctgaattattggcagtgacggacatgattgtccctaatgaaacggaagctgaaattatcacagggattaaagtgactgacgaagcatcaatgaaagctaacgtggaagcgatgtttaagatggggattaaagtcgttatcattacggttggggcaaagggctcattctatgcaacaccaacaacaaccgggtttgtaccggcatttaaagttcaagcagtcgatacaaccgctgctggtgatacctttatcggtgctttaagtacgaaacttgaattggattacagtaacattgaagcagcaatgacttatgccaataaggcttcttcgattgcagtccaaactaaaggggcgcaaaattcgattccttatgaaaaggatattcagttataatcatattaacagcgtccatggctagccggctgtgggcgtttttattaatttgattcgggggagtgccaaaatggttcgaaaagtaacgattaaagatgttgccgcgctggcgcaaacatcggtcacaacagtttcgttaattcttaataataaaggtgagcgctttagcgcagaaacgattgcgcgggtcaaagccgctcgggaaagacttcagtatgaacctgattatttcgcgcaaaatatgattaataaagaaacgaagacgatcgcggtattggtgccggatatcaataatcctttttttagtcagtttattcaaggtgtcgaagaaattgcctatcaattcgatttcatcccattaatttatagtgcaggggcgcataatcagaaagttgatcattatttaaaggaattggttcgtcgaaatgttgacggctttattttggctgtccctcatttacaaaaaacaacgttggatagctatctgcaaaaacgacaaattccgtttatcttattagatcaatcagataaacaacatgcaggagatgaaattacggttgccgatacgcaaggtggagagttggccgcacggtatctcattgaacgaggccatcataaagtcggaattgttttaccagaacaacgagcttggaacatcgaacaacgattcattggttatcaagccgcgatgttgaaagcccaattaccagtggcggatgagtggcaaataacgacaccgttaacgaaattaggtggttaccaagttgcacgacaggtgattgatagcggggtaactgctgtatttgcaatcaatgatgaactcgctatcggattgattcgtgggttacgtgaattacgagtacaggtgccagaagatatctcagtgattggctatgataacatcgattggtgtgaatatgtcacaccaaaattgacgaccattaagcaaccgattttcgagcttgggcaagaagcaacacgtctattattgaaccggattgtggagcctgctattgcgccacaacaaaaagtactttcaattgaattagttgaaagagagagtgtacaacctatacatccctaaatccataaaagcgtgatccgcatgaagccttgttatcaggcaacttatgcggatcatgtttttttatttgtctaaaaatgaaaaaaaggcttgtaaatatgtcggaaagaactagacttaataagtcttaaagacctgtctaaaagactgattaaagagagaggttatgcgtttatgtatgaattgctgatgttatccgccttaatgagccggaatatgtcgggctataagttgcggattatcttggaaaatgcgatggtgcccagacggaaaatttcaaatggggttttgtatccgttgttagataaattggaaagcaaaggctgcattgggtttgaggaagctgatcaggattcacgtggtacgaagattgcgcacattactgaagagggacggcgctattttgctgaattaatggctaaaccagtcgttcatgatgcgaagtgggatgatgcttatcgttttaagatgcgggggatgcactacattgatgcagcagaacaagtcagcattttacaagatttctacagtgagttggctgaagatttacatgtttatagcggtgtggaaaaacatctaactgaattaaaagatgcggatgagacaatgacggattattattattggcagattcgttcaaccgatttcgtaatcacaacgatcaaagccaaaatggattggctacaagcacaaataaatgagatagagaaaatggagatagtaaaatgaaaaaaacaaccaaccgctggatagcgctggtcgcgatgagtctgggtgtctttatgggattgctagacgtaactgtcgtcaatgtcgctttaccaagtatggcgattgattttaaaacaacttttagcaacttacaatgggttttgaacgcttatacgttgatgtatgcggtcagcttgttgattgtttccaaattaggggacatgttcgggcgcaagaaaatttttatcatgagtatgattttattcacagcggcctctgtcgttaatggactggcaccaaatttattggtattagatatcgggcgcgcggtccaagcgattggtggctcgggtatgatgagtttatcgatggcactagtggcgtcgaactttgaagggcgtgaacgggggactgcactggggattttaggctccgtgattggtttttcaactgctattggacccttagtagggggctttttagtcgaaaacttcggctggccatccatctttttcgtcaatttaccagtcgggattatttcagtttacttagtgattcgcaatgttaaagaaacaccagcttatggcgcgggcgaatcaatcgattttatggggatgatcttgtcagcaattggtttattctccgggatttatgggttgattcaaaaagaacaacatatgcactgggattggacagatatgcgcattatggggtggttagttgcttccgttttaattttagcgcttttcgtctttgtggaattgaaagcaaaagcaccaatgatgaacttgacgttacttacgaatcgccatttcgtgggtgttgtgattttagctttctcattaggcgctggcatttttgccttagccgcttatcaaacgagtttgatgcaaaattacatgggttactcagccttttcaaccggtgtgcatcaactgccaatgagtttatggtcccttgttttaggaccattcacgggtgttctaggctataaattcggtaaaaaatggttgattgcttttggatttactgtttctgcccttggtttattaatttttagacaagtgacaacgactgattttacttatatgcaactcttaccattgcttgcgctaactgggttaggcaatgcgattatcaatccaatgatcaatacagcggcgatggataatattaatcctcaagaaatcggaatggcatccggtttattgaatgttttccgccaaattggaattaccgtcggtgttgtgattctcggtttatcacaaacgaatgcctacgaaacgagtttgaagactagctttagtggcagctcaatcccgaaggcggcagcaactggcattcagcaagcattggttgaagcaggtgctttttcaggacatgcaatcgcgtgggggcaacaattagtgaagacaccgtatgccgcaaaggtccaacaaattgttgtcacggcttttgataaagggatgatcgctgttgtaacgacgtcgctagtgctcatggtgattgccatcttggcggcgcttttcttattgaaagaaacgaaaacgactgatcgagcataaaaaaagaaggttcattattttctgaaaagataagactgtaaattgtgtagcaaacagtgtaaaatgaacagagtaaaaataaaaaaagtgaggttacttacacatggctaaattagtttttattcgtcacggacaaagtgaatggaacttatcaaaccaattcactggttgggttgatgttaacttaagcgaagaaggcgtacgccaagctcaaaacgctggtgctttattgaaaaaagaaggcatcctttttgaccaagcttacacatcagtattgactcgtgccatcaagacattacactatgcacttgaaggttcagatcaattatgggttccagaaatgaaatcatggcgcttaaacgaacgtcattatggtgcattacaaggccaaaacaaagctgaagcagctgaaaaatggggcgacgaacaagttcacatctggcgtcgttcatacgacacacttcctccactattggatgcaagtgatgaaggttcagcagcaaacgaccgtcgttacgcacacttagatccaaaagcaattcctggtggcgaaaacttgaaggttactttggaacgtgttatcccattctgggaagacgaaatcgctccaaaattaatcgacggccaaaatatcattgtagccgctcacggtaactcactacgcgccttaacaaaatacatcgaaaacatctctgatgaagacatcatggacgttgaaatggcaacaggcgaaccagttgtttatgatttagacgaaaacttgaatgttgtaagcaagaagaaattaaactaattattaaagagtgtgtttaaagcgggttgattctgagcattagcctaaattcgtgaataatcgacgttagtcgattgtttgcggattgtagctaagcgcaggagtcagctttaaaaagcatgtttaataagcttacacaaataggctagtccctcaagggatagcctattttttttgcttaaaaatgacacgttagggcgctactagggcacttcagctaaatttgatagctaacggtaatttaaaacattttgttgacaagcaactaaaacgatggtaatctttattttgttgacaagcaactaaacgaaactaaagaaggtttttttaaatgagtacattattagtaatccaagcacatccccatgttgaaaagagtttatccctagcggtagggacccgctttgtagaaacttatcgtcggacccatcctgatgatcaaattattattcgagatctatatactgaagcaggtgttccaccattgaacgatatgacaatggctgcatggcgtaaacaaaaatttgacgaaccaatggctgaagctgagaaaacactattacaacaacacgcagattggttagatgaatttatcgaagctgataaatatgtcttcatcaatccaatgtacaatcattttttaccagctgagatgaaacaatatttagatttgacggcggtcgcccacaaaacattcaaatacacaccgaacggttcagtaggtttgttagaaggtaagaaagcaatccatatccaagcagctggcagtgtttatcacgctgggggcaagtgggggatcgttaagttcttgttccgccgtttatttaagattaggagtaacgaaagttctgcacttatggatttaggcgatatgtatttaaccaatatgttgaaattctatggtgttaatcaagttgaacacgtctatattgaaggcgcggatgctcatgcagatcaacgtgaacaaatattagcacgggccctaacggaagcgacgaccaaagctaaagtattctaatttggtgtatactggtggtaacaattgatgagaggttaagcaaatggaaaacgaatcagtgatggcactctatcatgcaatcaagcaattacgctcagatagtgtcaacggccgcggtgttcaagaacaaaaatggttgcaaaatcagctgagtgatgagaacttgaaaacgatgattccgcagctatcaatcattgcattgcacatattatcaggattagaggccgaagaattaacaggtgtagcactagcggatcggttggcggttacgcgtggcggcattacacgcgccgctaagaagttgattcaaatgggcttaattcaagcgactaaaaaaccagatgatcagaaaaaaatctattattctttgaccgctaaaggccgtgtgattgcgcaaagccacgataaaatgcatgaaacgctgaaagcgcaagttattgataaggtgaccgaaaaatataaagatgctgaattgaagcaagcagcgtctttaatcaatgatttaatgcaatttgaacgcgatttttattgatgatattcaaataggctagtccctcaagggctagcctatttttttgtattaagttatcgacggtattttcgatttgctttattgttgcgatgatatagatacaaaagaaatgccagtaatactgtgaccagaatcctcatagccaaaataacatagaacgcaacttctcttccagcgtgaatttgccaaattggcgagaataacaaaaataaaaactgtacttcactaatccaggctgtaacaacactaatttgagtaatcttggttttgaacccgattaaaaaaataaataatgaaagcaagtaaagcaacacagtgacaaatgtagtcgtatctcgagcaaatattgcaagaatttcaaaagttactttagcaccaaagataataaagaaagctgaaaagacacagagacccacgatactaataataactcgacgcagtaccagtaaacgaccttggtgttagatctttgaatagaccattaaacataataagaacctccaaataaaaatcgcgcgttttataatcaagttagccaaatacttttagctaattgataaaataaaaaacaccaagacgaatctctgttatcattgatgttcctacacaaacaatgaaagaggttattgtcttgatgcaagaacagaataccacagtcagaaaaaaggtcagcacctaacttcgtttgaacgaggcagaattgctacgctgcacagccaaggctattccaatcgtgcaattgccagagcgcttaatgtttgtcatcaaacaatcaataatgaattgtgccgcggcgagatcgaccaagtaaaaaaagtgaatggtcaacgccaatattacgctgtatactcaccagaaacagcacaagctaagtacgaagctaatcgagcccactgtcatcgacctttgaaactcggaggattcggcacatcttggttacctggtggtgatggctttcttggtgaatgtaatcaaagatattggttacttctgcgcaaggaagcccagggctttttttaggatttcgttctcctcagacagcgaagccagtcgcttttccatcgctttgattttgtctggcgatttaccggattgagttttggcctggccttggatccacttatgaactgttgaatagccaatgccatattctctggccagttgggcagctgattcgccttgcttatataggttgataatgttttgtttgaattctttgtcgtaacgagttggcatgtaaaaattccttccttttgagagatgatttattcattataccctctcttaaaagttttctcaggaatcagcttacatccagatggtcgtgatgccgattcagtcaactatgagctggccaagatctgtcaagaatacggatcaatcatgaagtcagttactgccgataatggcgctgagttctcggaagttggcgctgtacttaccggtgtcgctgacctttattatgcccatccatatcgttcctctgagcgcgggactaacgaagcgcataatcgaatgatccgccgcgatgtacccaagggtctatccatggatattttgggtcctcatgatatccaagcagttgagtcaaagctaaacaatttaccgcaccggcaaactggctatcaaacacccaaagagcttttctccgctgcttccgccggttaagttaagtccataaaatatgaatattaatgaaaatactgatttaataggatttatcgtgtggctaatttgttcttgcaatttgggagtcgaaaacaaatggatttcattcaagattaaaatgagttatattgtctttaaatataataaggattggtgatgatcatgaagattgttgtgattggctccgttgcagcggggacgagtgtggcagcaaaggcgcggcgaaatagtgaagttgatgagattgtcgtttatgaaaaaggtcaggatatttcttattcggtttgtggcatgccttattacgtagggggtgaggttgaagacctagagacgttaattccgcgcgatgcggcgtggttcaaaaaacgcttcaacgttgacattatgacgggtatcgaagtgatttcaatcgatgaaaaccaacaagcgctggtcttgaaaaactttgagacgggcgagttgtttgaagattattatgaccgcctagttttagcgacgggggccacgccacgcattattgcaccgttcgatgaagcctaccaaaacgtcttcacgatgcataacatggtagatacacgcgcaatcgacgcgtatttacagcaccattcagttcaaaatgtgacgatttttgggaccggttatgttgggcttgaaatgatggaacaatttcaaaaacgtggcttggacgtgacgttagttcaacgaagcgcgcaaattatgacccattttgatggtgatatggcctatcgtgctgaacaagttattcgtgctaacggggtgcatgtgttaaagagtgtaaccgcaaaacaagtgactgcgcaggatggtgtggtatcggcggtagaattgagtaatcagacgaccattcaaacggatttggtcctactagcacttggcgttgaaccacaaacgcagttggtcgaccatatgaagatagctaagggaccttcaggggcgttgaaggtcgaccaacaaatgttgacgactgtaccgaatatttacgcggtcggcgatgttgttgagagtttctccgtaattgatggctcaccactgtatcgaccaatgggttcgactgccaataaaatgggacgaattgccggcaattcattgactggcggtggcttaacgcaccgcgggattcttggaacggggattgttcggttgttcgatacaacgattgcacagactgggtttactgaagcagtcgcgcgagctaaggactatgatgtggaagtactctacaacattaaaccagggcatgcagattacttaaatggaaccgaaaacgtcattaaagccattgctggccgtcaaacgggaaaattattaggtgtacaaatcattggtaaagatggggttgataagcggattgacgttttcgtgactgccatcacattgggtgcgaaggtggccgatttattccatctcgatctagcttatcaaccactctatgcaaccactaaggatccagtgctctatacgggaatggcgctcgataatgcattgcatgggcggccgctcttgcctccagctgaattggagcaacgcttggctgaaggtgaacgcttccagattttggacgtacgttcgaagcaaaaatatgcggacgagcatgttgaacatgccattaacatgccgcttgctgaaattcgtgatcggttcacggaattagatatggatattccaactgtcacctattgcaataaaggggttacggctaatgctgctcagaatttacttctgaacctcggttttaaatccgtgtataacttgagtgggggcttcaaaaattatcaggtagtcaaagcctacttgaatgataaataatataaaaataccgctgacaattcgctgtcagtggtatttttttgcgttgttatagatttttggtgaaaaattgagttaattctgaaaaaggaataagcgcgatacgatcatataaatcgacatgcccagctgcttttacggttaataactgttttgattcgttagcactggcaaaggcggcttcactgaaatgtcgtgaccatgcctcttcaccaacaacaaagagcatggcacgttctgtgatcgtttcgaggtcgcgcaatggatagaaatctaatagtttagtaaaagttgtacgagtgggatggagtgtcgagttggctgcgccacgttgggtacgataaaagtcgtagaattcacgttcgatatcagttgagttttcgtccagttcttcaggtactccatgggcgtaagtggttgcttgacctgcaatctctaatgtccgggatcgtgaggattcctcgattaatgcgttaccgcctagtgcatcacgctgttcgcgaacaatggcacccatatcggttaagttaatagttgcaagtgctttaatacgtgcgtctattttgagtgcgttgagcgtgaaaccaccggccgaaccaattgcgattaagccaatacggtcattggcgacacagtctagagtggttaggtagtcagtggctgctgagaaattctccgcatataagataggggcaatcgcgttgcgcagagcaccgttactcccgccccaagcagattgatcaaatgaaacggttacaaacccttgttcagcgagcttaatggcatataggttagctgcctgttctttaacggcaccgatgggagcaccgatgattagtgctggaaaaacagtttccgtcgagtctttgggaagaaagacgttagcagttacttgcatttcatagatattcttaaaagtgacgggatgctgttcaacggcttattagtaaccttttttactcagaaaaagtgagtcctttattttgaaaccgactatcgatcctagcactttttaattcgatcgcaaaaataatctctttttcctattcttctttggataaactctcaacatagcctggtacttgtttttgataggcctctgctatatcactaaaacgatactgagttcggtataccttgagccggttactcgtgattcacaattcttcactagtcggtagcgtaaaaattgcggctcgccccaaatcgagttcactgactttcggcgcttcggggtcggtgccaaaataccagacattcggtatcccatcaagcgtgacaaaattaatctgtcgactagccggttgtcccaggttgttcgctgtactcagcaccattgtattaaactgcttaacatatttacgaaactcgcttaagttattttgatacagctctgaactaaccggctgactatcaatataagcaatcgcatcatcaatcgtttctaatgccgggttagcctctaaataataaagaatctgtggaataatgtgggatatttctcgttgataataataaaactgaaaccagcgattagatactgataaggcctctgtataacgcttaacaattcgccgccgatagcgttggacgatatattttaacggtcgatatttaatcaacttttgaaagaatagtaatatggtgcaaacgactaagttaatttaataggttatcgcttccataaggtcattcaaacaaaaaaagagccccgctttcgcgggactctttttcacagtttaacgctgtgcttcatcttcgtgtaacttacgtaaaagttcgtcgatatgttcaccataacgcactgaaccgtcttgttcaaaggtgatttctggaatcttgtacaacttaatccgttggccaagttcgctgcgaatcaatcctttagctttatctaagccagcttgtgtcttttcagcgtcacttgctaagccagataaaatgctgtaataaactttaacatgttgtaagtcaccactgagattaatatcagtgattgtgaccccttcaactcggggatcacgcactctttttaataaaatgtcatttatttcgcgttgaatttcttgttcaacccgaccaacacgatgtttcattgcttgtcctcctgtaaattaattatttaacaggtacttcttccatcacgtaggcttcaatttgatcatcaatcttaatatcattgtaatcttcgattgtcacaccacattcaaagccagttttgacttctttaacgtcatctttgaaacgtttcaagcttgaaagtttaccttcataaatcacgataccgtcacgaattaagcggacaccactatcacgttggataacgccagtgtcaacgatacaaccggcaattgtcccgatcttagaaacattgtatgtttcacgaacagttaattgacccgttactttttcttcgtaaactggttctaacatacccttcatagcagcttcgatttcttcgattgccttgtagatgattcggtgtaaacgaatatcaacttgttcagcatcggcttgaatcttagcttgtggtgttgggcgaacattgaacccgatgatgatggcgttacttgcagcagctaatgtgacgtcactttcgttaatcgcaccaacggcttcatgaataatattcacgcgcacgccttcgacttcaatcttccgtaaactaccagccaaggcttctgttgaaccttgtacgtcggctttgataataacgccaacttcttttaattcgccttgtttcattgtttcgaacaagttatctaatgtgacagggtttgaacggctacgttccttcaagagcgcacgtttagcacgttcttcaccagcagcacgagctgttttttcgtcttcaaagacaacgaaacgatcagctgcttgtggcacatcattcaacccagtaatttcaactggttctgatgggaagacttccttcacacgacgaccgcgatcatttgtcatgacacggacacgaccaaaggtattcccaacaacgattggatcaccaatcttcaatgtcccttgttggatcaagagtgatgcaacaggtcctttacccttatcaagacgggcttcgatcactgtcccaaccgctttttgatctgggttagccttcaattcaagcacgtcggcttcaagaagcaccatttcaagtaattcatcaatgttttcaccagtcttagctgagatcttaacaaagatggtatcgccaccccagtcttcaggaacaaggccgtaacccatcaattgttccatgacgtgatctgggtttgcgcctggtttatcaatcttattcaccgcaacgatgattggggctttagcagccttggcatggttgatggcttcgattgtttgtggcatcacaccgtcatcagcagcaacaactaagatgatgatatcagtgatatcagcaccacgcgcacgcatgttactgaaggccgcatgtccaggtgtatctaagaatgtgattaaacgatcgtttaacttcgtttggtaagcaccgatatgttgcgtaatcccaccggcttcaccatcagtcacgtgactgttacgtaagttatccaataaggttgtcttaccatgatcaacgtgacccatgattgtgacaactggtggacggctcacaaggttggcatcactcttagcttctgtttcaaatactgaatcgatatcagcaatatccacttccactttttgttctgcttcgatgccgtaatccgttgctaataattcgattgtatccttatcaagtgattggttcatgttaaccataatccctaacatgaataacttcttgataatttcagctggttcacggtgaatcttcttagcgatgtccgcaacgttcatgccttcagagtaaactaatacttctggtaatggccgttctttacgttgtggcatttccttcttagcagcattttgttcagctaattgttgcttacgggtcttcttacgtttcttattgaaacgttgttgattgttaccgtagctgttatacccgccgccacgtttcttatctggaccaaagttctttggcttgcttgctgtattgtttgatgctggtttagcagcactcaccgtattagcttgcattttttgttgcatttcttgtgccgaaactggccgactttggttcgagttgttattaggacggctgtttgtattgtttgctggacggccgttgttattgctgtttgcaggacgattatttgttgtcgttgggcgtgcgccggctggcttgttgccggctggacgactgctgttattaccgtttggtttagcagctggccgtgggcggttactttgttgacggcgtttcttttcgtctgcttcgcgttgttcacgttgttgttgaatgcgttcttgcgttctttgacgacgtgcattagcttgtgagatttgttcttgcaagctcaatggttggtttgacccagctggacgcgtattgccgtttgtccggttagccgcattattgttagggcgaccattattaggacgggcgttattgttgttaggacgaccattggcattgttgcggttttgaccatttgatgcttggccattccggttgccttgtgggcgttggttgtttgaacgaggtgctggtttgctgctagcttctggacgacgacggatagcggctttgttaatcttaatcttaccgttatctgttttttcgcttgcctttggtgcagcaggtgctgcggctggcttgctgtcagttgtcgttgcagctggttttgtttccttatggaagatggctctcaaagctttttcttgattgtcatcgatagttgccatgtgattttttagatcgtaaccttttttaacggcagtttctaaaagatctttgctggcaacgttaatttcttttgctaattcatagatacgttttttacccatatcttcacgctcctttattatcccagtagcgttatcatctttttggcaaacccggcatcaacaaccgcgatggtggctctatgtaatccaattgcttgggttagctgggccgcggtatacgcttttgtttccgggatttcgtagaaatgactcttatcagtcaatttcttctgtgtcagttggctaatgtctgagccgataaaaaccaatttcgctttttgctgctgaatggcttttaggacttgttcttcaccactgaccagttgccgtgctctcatgcaaatacctaagagttgtaataaacggtctggttgttcactcattttcgttctccaaataattctagccgagccttttgatgatcaacatattcgaataattctgtataaaatgattctgcaacgtcaatcccaaacgtcttttctaaaattttcttgctttgggcggtcttgattgcatcaggttctagtgaaacataagcgccacgacctgatttcttaccagttgggtcaatactaatctcaccttcggcagtctttacaatccgcaccatttcttttttaggcttcatttcttgcgaaataacgtcttttctcattggtacttttctttgtttcatcatgaacacctcacttattcttgtggttgttcttcagaatcaacagcagaatccgttgcttggtcttcgaagccttcaacagcttctgttgtttcttcttcaaaaccttcaacgactgcaccttcatcttgactatcgtcttcatcaacgaattcgacttcagattcaggtttgatgtcaatcttgtagcccgttagcttcgcagctaaccgtgcattttgaccttttttaccgattgccaatgacaattgataatcagggacgatgactgtacatgtatgttcgttatcaccgttaaattgaacagcgatgacttcggcaggattcaaggcattggcgatgtagtctgaaggatcttcttcccacttcacaatgtccatgttttcgccgtgtaattcattaacaactagttgaacccgttgtcccttaggcccaacacaggtgccgactgggtcgacgttggggtctgttgaacgaacagccatctttgtccgatcaccagcttcgcgagcgattgagacaatttcaacggtgccgtcataaatctctggaacttcttgttcgaataaacgtttcactaaatcagggtgtgtccgactaacaaagacttgtgggcctttagttgtattttccacttttgaaacgtaaaccttaatccgatcatgtgcttggtattcctcgtttggaatttggtcttgcttgcttaaaacagcttcgatcttgcctaagttgacatagatgaacttgttatcgcggcgttcaacgaccccttgcataatttcgttttcgtattggctgtattcattgtaaatgatacttctttcagcttcacgaacccgttgcataatcacttgtttagcagtttgggctgcaattcggccgaagtcttttggtgtgacttcaaaacgaattgtatcgcccacttcgtatgccttgttaattgccaaagcatcttggtagctcacttcaagccgtgaatcaaacacttcgtcagtgacttctttgacagcatagacgtggatgttacccttcttttgatcgaattcaacttccacgttttgtgcttgaccgtaattccgcttataagcagaaacaagtgctgcttcaagggcttcaataacaatctcttttttaacgcctttttcttgttctagcgcatcaagtgcacctaacatttccttgctcatgtaactagcctacctttactaaaattcaattgctaagcgagctttggcaatttccttacgattaaacgttacttctttttgacgcgttttaattttaatcactaaagttaaagtgtcatcatcaagggcttttagtgtaccttgatagattttctcgccatcaacagcttggtataacgagatatgaatgtattcgccaagtgctttttggaaatcggcttccttctttaaaggacgctctgcaccaggtgatgaaacatctaagaaataagcctgcggaattggatccgggtcgattgaatccagtttctcacttaacgcatcgtttactaaggcacaatcttcaaggtcaatgccatttggtttgtcaatgaagacgcgcagataccaactgctaccttctttaacaaattcaatgtccactaattcaaaatggtgttgatcaagaatcggcacgatcagatcgtgaactgtttccacaacggtactcaaatgattccctccaattcatttttatatttcagattagacgtgctccaataaaaagagtgagcatttctgctcactcgctctgaagtatctaattactgataacaatataccatatttttcatgaaaatacaaacaaccgctttaattttcagtggttgcgacgctattttgcgtcttacccgtcgtcaagatttcatggaagttttcaaaactaatttcgaccatgttcttgagagcttcatcagtattcgaaccaacgtgtggtgtcaacaagacgcgggggtataaatcaatcaattcttgagtggttgcatctggaacaggttggtctgctgggaattgcttgaagaagatttcgccttcagctggtaacacgtcagcggcgaatgcaccaagttgatcagctttcaaagcatcgataatcgcacggttatcttgcaattgaccgcgggctgtattcaccaagattgcatcgttcttcatctttgcgattaagtctgcattgatgaattggtcgttttgaccagcgaagtatggaatgtgcaagctgacaatgtcactttgggctaataattcatccaagctgacaaaatcaagcacttccttagcgatttctgatggatataagtcgtaacccacaaccttggcacctaagcctttgtataacttcgcttcggtgtagccaatcttgccagtcccgataatcccaaccgtacagttgcggacttctttactgaacatcacagggctcacacggaaatcatgatgggctgtccgattcgttgtgtaagtggtgtgacgcaacaatgacatccctagcgtcaatgccaattcagcaatcgcgtttggcgagtagactggcacgcgagcaacttccatgttgtacttgcctgctgcggccaaatcgatatgaccgtaaccgactgtccgggtaaacacgtaacgaatcccgtattcattcaacttcgctaagttttgcgcatcagcggtacagttggcacgtaacaagaccgcgtcatgccccttagccgtttcgatattgtcgtgcgtcaataagtcttcaattaacgttaaatcataatcgtagttgttatatttattgaacgtcgccacttcattcggacgaacgccgtaacaagcaattttaaacatttaatttccctcttcctagaaaatcccgatttggttaatcacttctaaaatcactaaccagactggcgtcatcacaacagctaagaccgttgatagtaatgacgcgttcgatgctaagaccgcatccttgtcaaaactaatcgcgtaagcagcggcgaccgttgccgttggcgttgccatcatgatgacaatcgttgccaaactgatatagctaactggtaaaatgtgggtcattgttaagatggccaataacaggatgtttaaagcaggtactaaaatcactttgttaatactataaatccatgatgtcttgtccgaagcagcttctttgaagctgatttcgccaagcgttgtcccaattgctaaccaagctaatggtgaacataaaccagctaagtacgtcattggtttgaacaaccatggcgctgtttgatcaattcgtaagaaggccactgaatgtccagcaaccgccacttgtggtaatgcgccttggattaaccagatgattaaccccgcaaatgtggcgatcacgattggatttaagaacatgtttttcaagttcttcgattccatcttcaagccactcatcttgatgtacccatatgagtataagaacacgcgataaccaatgttgaaaattgagctatacataacccctttagctccgaaaactgctccaacaattggaatcccgaagaacgttgttgaaccaaagatggtcaacacgcgcaatgtatcttgttgatcacccttaaagcgtaagtataacggttttgaaattaaaattaaaataatatagatcaagaagccccaaactaaaacgttgatgccttcttttaaagtcttcccattaatatcttgcatgaatgagttgaatgccaaagctggtaaagcaaccgttaaaacgacttttgacagaatcttcccaaatttatccgtgaagatctcgcgtttgcggcagtagaatcctaataaaataataaacactgtcgacgtgatcgaactcacaatatccatgttcgtaaacgtcttcgttaaaatatcgccaatcctcatctgtactctcctctgttataacatttagtccgctgtattataacacggacaactggtatcgattataacaagaaagtaacggaaaagaaatagggcaaaagaaaaagagtgaaaaataacttcactctttctcagacctaaattttgtattcattttcattacatgctatatattaattatctaaactgccaaggaggccttctcatgcccagacaaagcatcttcaacatgtctctttccaaaatctaccccatgctcgtccaaaaagccgaacgcaaaaaccgcacccaagccgaagtcaatcagattatctgctggctaaccggctactcacaaagcgaactcgacgcccaactcgctaaagacatcccctaccaaacgttcttcgaggaagcaccacagatcaatcccaattgtaatctaattaccggcgtggtttgcggcgtccgcgttgaagccattgaagacccactgatgcaaaaaattcgctggctcgataagttggtggatgaattggcgaaggggaagacgatggagaagatactacgagaataactaaagcactcataaaaataaagccttagggattagcttgaaaaactaatccctaaggctttattcattacacatctaatcttttaaaaactgttgttgaactggtttaaacaaatttctaactgtcccaaagcgaggcggataatcattagagccaccagactcaatcactgttccgtctgcataggtcgcggttactgaccattgctcaccatcaatgatagactcgttaatataatagtcagcccacttcggaagttgcaatcttgaaagtcgattacgaacccgacggatagtatctgcatccaattgaaacctaatttcttcagggtgaataaattcatgcgttaccattctgccaatcatcaaaccagtttctaaatcgagactatatacttcatgcgggccaaaataaccatgacttgcgaattcaaatttatagctccatagtttaaagcattacatatcatattacttcaaaaaagacgttaggaagttttcttcactcttcttcattgcttctttaaacgcttgataacctacagcatcatctgtttcggcccgtacctcaggaatcttcaaacctaattttgcaatcatcaccgattcacggactgatacattatcctcataggttactccttgtctcagatgcaatggcgtaacgagttcgttcgtatgattaggatagatgtaatagccttgttgagcatcaaagcgtgccatatatgcaactaactgcaaataatcctggttaccgatatttccttgtggcttatactttgcatcagcaataatacgctgttcttggacgcgactgataaaatcaggatagattaatccgcctcggtcgaataagtattgtccacccacacgacttttattcattgggtgataaaaccacggtccaatcaattgattaatatactcttcccagagccacgcacagtcaaatagaataccttgtacttgttgactgccgccaccaattcgttgtttttcaaactgcaaaatcattaaacacaaccgttgtaaacttcgatattctctataataagcatgtcgaatcggattttctttatttttagtgataatcgttcgacgatcataatcttcataatgttttgttgcaacaactattgtagctacctcatcagatatcttgcctaacacagccttcccgtacgatttatttctgataaattcaatcgtatggcgaattagcaatgttacttcattctcatatgaaaattcacgttgattataagcaatatttccaataaatgggctattttgcctaatatgacgtgccacatcaattgttccacgtatattactgtcattatattgacgccgaccataagttttaaaaaggcctttgcgtagcgctttttttaaataaagtggcaataaaaaagccaataagtcaaaccccaatctatcccgctgtgcctccgtatttaacgccatcaagttaggcatatcaaacacccgctcaattagatactgaaaaaaataattgttcgccgatctttcaaaacgagactgaataatcagcctctcatcttgataaccaataaaaccagctaaattactggtttgataatcctcattaatacttcgaagaaccatttgatcggcagtaagatcgtcggcattggcaattatttctggaaaaataaaaaggtgatcattctttagttgcgttagcgtttgattaactaatttatttgtaagtttagggatatccttatagtgttcttttaattcacgttgattatccctagtcgttttcagcatcattattcaatcctgccattttattaggattatcatacgctctcttaaagttagtcatatatttcacctcatcatagagtccacgtacatagtcctgtaacaacggttccaaataatctgaccacaattgttcgaaggaaactgttgctagttttagaaagtatgctgcaccaatttgataattttcattcaactcgtccacatcaataattgcctgatttaatgcaaacatacggttggtcgcttcggtttgcttatcccctaaagctgccaacatcccaatatgttcattagccttaacttcaataaagcggaatcgacggcgcgtcgcaaaatcaaaactatcaaccgatcgatcaatatcattcattgttccaataatataaacattctccggaatataaaacttctccatcggatcatcatgtaaattggtatattgcgtcgaaactgccccttcttcaccacgatatcccggatcaattgagaagaatagttcaccaaatattttagagatttcaccgcggttgatttcatcaataatgaaaacatagggtttaggcgccgtcagttgaacttcaacatactcttttagccccaaattatctttcatatattggacaattgcctttcgataattatcatgaccgcccttttcgacacccggtttaccttgataaatattgtaaagctgcgttttattataaaagcgactcttcccttgaatccaattaccaaccccgtactcgcctgggtaggttcttgtcgttagaccatttccttgttcattcagctcaatttgaaagtaaccacttcgagcattcggaatatttaaataaccgacctcctctaattttaaaatgagttgttcccaaactaatttaaaattatcagcaccgcctttttgagcctttcttgcgttcattacgaactctttaaatactccgttttgtaatttaaatcccatttccccatcatcagtggtaaccggacgaaggccttcaacaaaatcagtgtaatcataacttgggtgaaattgaacaaaaccaacttgttgcttctgttctaaggttaagtcagcgtatttttgaacagaaccattactaattaaactcgcagcaatgcccttagcaagatatgatttccccgttccaggggcgccccgtagaataatatttttagattctttcagtttttcctctaaattacctaacacatcattgtccccattccgtactggatagtttgtaaatgttgcataaaaatgagtaagtttctgattgggtatatctttcgaaaataaatctaaatcgtccacttggtatgcttcatttaattcagtatcgtgttgatcttgatgcacaataattcgtaacgtttcaattttctgctgtctgaaacttgcacggatattaacactcttacctactgccaaatcataattcaaatatggcaacttactatcgccttcaccgctaagtggtccatatgatcccgaattaaaaagatggatcatataatgaatattatcgatttccaactcatcaaaattaccggtatgtctaaatcgattcttttcaaaccccgatgcgcccactgtcgtactgcgtccttcttttgattgaatattcaaattcgcttgttcgacaaagcgacgtaataaccacttaaattgactcacattttcatcagtattaacgatacccggcaccttcacttcaaatttttatttatgattattttagcatagattgaaaatatgaaataatcgttttaaaaaaccgtaaaaaccttacgtttttatcgagcgtaaaagttatcgaatatcactagtttatttttctaaaaatgatatgcgaacactgcttatcaattgggaagagcgtaagttaggtgatttagctaatattgttcgtggagcaagcccaaggccaattcaagatccaaaatggtttgataaagatagtgatattggatggctcagaatttcagatgtaactgaacaggaggggagaatacgtcatcttgatcagcgtatctcaaaattgggccaggagaaaacaagagttttaattgagccacatctgctattaagtattgctgcaaccgttggaaaacctctggtgaattatgtcaaaacaggtgtacatgatggattcctaatatttttaaacccattatttgaaagagagtttatgttccagtggcttgacatgtttagacctaattggaaaaaatatgggcaaccaggtagccaagtaaacttgaactctgaactagttaggagccaagaaatacctattcctattcttgaggaacaagaaaaaattggttcattcttcaaacagatagatgacactatcgctcttcatcaacgtaagttggatttgctcaaggaacagaaaaaaggctacttgcaaaaaatgttccctaaaaatggtgcaaaagttcctgaattgcgatttgcggggtttgctgacgattgggaagagcgtaagttgggggacgtagctcccttacgtggcggttttgcgttcaaaagctctgaattcagaaacactggtgtaccaattgttagaatttcaaatattctttccagcggtgaggtaggtggagcttttgcatattatgatgaacaggataaggatgacaaatatattcttccagataaatcagcagtcttagctatgtcaggcgcaacaacaggtaaggtatctatactatctcaaacttctcatgacaaggtttatcaaaatcagcgagttggttattttcaatccgtagactgtatcgactatgactttatttccacaatcgtccgttcagaattattcatgatgcaacttgagtctgttctagtttcaggtgctcaaccaaatgtctcgtcaaaagaaattgattcgtttgactttatgattccaaaattagttcaagaacaacaaaaaatcggctcatttttcaaacagttagacaatactatcgctcttcatcagtctaaagtgggaaaactaaaagttttaaaacaagcctatctccaaaaactcttcccttaaacaaaattcgttaattcaagatattaaaacgactatttatttatactttgatagtgaccaaaattggtcactattttttataggggagtggttagttatgcggggaaaatatctttttcacgaatactttgaagaatggatggtgttatacaagcgcggcgcaattaagcaggttacttatgataaatatgaattaacgcaacggcagattaaaaatcttgcacctacgctattattgtcagacttagatcggcgagcctatcagcaattattaaacgattatgctgcgacgcatgaacatcaaacgacgatggattttcatcatcagttaaaatcggcaatctacgatgcacttgatgaaggttatttgaagaaagatccgacgcgtaaggcgattatcaaaggtgttgtccaaaggcgccataagatgaaatatcttaatcagggtgatttgcgccgactttttggtgtcttgaatctagaagacgaggttaactgggattacttcattctattactcgctaaaacagggttgcgtttcggtgaagcactaggactgacaccatcggactttgattttagaacccaacaactaacgattgataaaacatggaattacaagcattaccgcggcggctttcaatcaactaagaatcagtcgtcagttcgaaaaatttcattagactggcaaatcgcaactcaattcgcacatttaattaaagatttacccgaaaaggaaccaattttcatcgacagaacacgccgaacacataatgatacagcgaatcattatctagaacgtaaatgtaaacaagcgcatatccctgtcattagtgtgcatggtctcagacatacacacgcttcaattttgctatatgcgggtgtttcactagcatcagtggctaaaagacttggccatgccaatatgacaaccacgcaaaaaacgtatctgcatattattaaaaaactcgatagtaaagataatgacaaaataatgcagtgcttgatgacactgaactaagcaaaaaggccgcgaattttcgtggccttttttgaatttctctttaaggaaaaagtttttggagataggcttgttttaattgctgtagctgctcaattttgagttgttgaagtgaaagatcttgatctaatttttgaaagaactctccgattttttgttgctcttctaagtttttagagatgaaaaacattgtttctgatacttttttccagtctgaaggtggcattttcgttccagatgtatcatttgcagctttttggtatttattagtttgaattagattgtaaacaaagttcgaaatattattcgtggatctaaaaatccagaaatcaccaagtgctattcctttaaaatttggcattaaccaattctttaaatacggacgaagtttaccatataatatatcattaggttcaaattcaattccctttcttgtgtcaaattttttacttatatccttatttaatctgccttctccagcagaaatatcttcaaattctatcttaggcaatttattggaattagaacttttatttacgcgaattattatgttcttaaacttaatttgtccccaatcatctttaaaaccactaaatcttaattgtggaacaacttcatttttaacaggaaacatttgttgcaaatatccttgttttaactttttcagcagatcatgctttcgctgatgaagagcgatagtgtcgtctaactgtttgaaaaatgagccgattttttgttgctcttcaattctagggatacttatgatagcttctttgatatcactagaattaatactttcaaatgttgaacccgtgctatatctagtccaataaccgttagacttcattttcccaagattctgaaatataaactcattacctttgatagcagcaacacctcgaccgataaccacgtcataagctgttttgccaatatctccaaccggtgctcgaacactcaaaatgagatcgtttttttcagcttgtttagtgacttgagttgtccatactcttggaaaaacatgaccatttttcatgtcagcattaccttgaacaagaatatgatcattaggattgtcagtataattttctgaattaggagactgtcccatcactatcagaacttcgtcccccaacttacgctcttcccaatcgtcagtaaagcctttaaaccggagttctggttgctttttttgctctttcatttaatcagactcctttttcgttgatacgagctgtgcttccatttctgcaaattctttttccaattttgcaatttctaaatcgatagctgcaatttcttttttaacctcatcaatgtcgattggttcttcttcttcaaaagtgtctacataacgcggtatattaaggttaaagtcgttttctttgatttcatctacagttgcaacatgagcgtatttatcaacatctttcctactcttgtatgcagcgacaatcttatcaacatcgctatctcgcaagttattttgattcttagctttctcgaaatcactacttgcatcaatgaatagaacgtctttcacttggcggtttttcttaaaaacaagaattgtagttggaatacttgtaccataaaataagttagctggtaggccaatgacggcatctaaataatttttttcaattaacgtttgccgaatcttgccttcagccgcgcctcggaataacacaccatgtggcaagacaattgccattgtcccgtcgttgtttaaatgatagagactgtgcaatacgaatgcgaagtcagcttttgaagttggtgctagtttaccgtattcactaaaacgggggtcttttagtttcgtttcattattatcccattttgccgagtatggtgggttagcaaccactgcatcaaaactcctaggttgatcaaccccagcttcatcaggaccgtctggccaatcactttcaagtgtatcagcattgtttaaagtcatattgttaaatgacacatcgtgcatcattaaattcatgcgtgccaagttataagtcgtcgtatttaattcttgtccgtagaacttaatcgctcctgcttgagttgtttcgggtaattgattacgaactgttagcaataatgatccggagcccatggttggatcatatactgagaatgctgtattacttggtgcaacatccatcgtcactagtttagcaagaatcttgctgacttgatggggtgtatagaattcgccaccctttttcccggcactggccgcgaattgtccaattaagtattcataaatttcacctagaatatctttatcttcatcactcttatattcgatatcatcaactaatttgacaatattattcaaggatttagcacgtgccgtcgttgaactacctaagcgcgaatcaccgagattaatgtcgttaaagaccccgttgaaatcttgagcagcctcttgatttaagaccgcatttttattgaaattatcaaaaatcgtttgataatcacttggaataaccgtgctattttcaattcgttcatttaatgattgccacgtatcagctggcgcaatcgcataacctaaacttgacgaaatatcttcaagataatcagctaattcatctgccgttgcttgttcgacataagcttgattaattgtctgcccatcggcaacatcaatcacattattagaaactaaatattgttcctgatgttctgaaaggtaccgataaaacataaaggctaagatataattcttaaattcaccagcgtccatatttccccgtagttcattagccattgcccataatttcttagtgatgtcttgtaatgttgttatctcactcattagattcgttctcctttaattgcggatcttttaatgtattacatgtttatcagctgctaaataaattgcttcgcgtaatccgtttcggtacctgattttcgaaagtgcttggatatcagcatctaatgctaaattcttataactcaaacttgcttcagcaataatatctcgcaattggccagcatcatctaaatcttgttggccatattgatgcgtactaaatagttgtcgtaacccagcactcgtaatcacatctgtgatcccccactggtttcgaaattctaataaaatccgatcaatactaatttgattagcttcttgaataacttgctcactatcgtccaacttgacaggatatatcattgccatccctttaggtggatagtagccatcaaggatcgcttgtgtcgcgtttttaattttgtgcgcataattttggtcttctaagccatttgcaaattgatcaatatccttcttcgtcttctgagcagcctcaattttttcttcatgcatttcattcaagagtttttcaacgagttccgtcaagtaatcgtagttgacttgaacatctttgatgtgcgtcatctttaactcaatttgctgaacaggcactttatcccgcacactaatgtattgttttatttcattcgttaaaacagtggtcaattccttttcttgtgccggtgtcatccctaaagcacgaattaaatcgtccggcgtatcatagttaaatccactatcttcttcaccatcttgcggtgtatattgtttaagtttcgacataccgacgttgtattgtcgcaataattcaaacatctcgtctttttggcgttcacttggtggtaattgattaaaaccatccgttaaatcatccagttggccgacaatcccacgaacctcttgcaccatgtttttaaaatctttcgctaaaacaccagaatcgacgttttcctttttctgttctttttctgataaagtggctgaatccttgttggaataaatggctaatgctttattcattaatttttcattctggctcggccaccgataattaaccactcggccccaaggtttttctttcatatcagcgattcgatttgttcgagagtacgcttgaattagacctgccccttttaaagtacgatcaacatacaaggtattcatttctggcgcatcaaatccggttagtaattgatccacgacaatcactaaatctaggtagttcttgtcagttgcagttcgattaaggcgactcgtaacatcttgcgtatagccagaaacgtcatctaacccaaaacttgttccaaattgatgattataaaccttcatcgcatcatgtaaattctgattggtttcgaccatgccatctttattcgttgtattttgactaaatgtaattgcaactttcagcagttggccgccgttctttgcatgctcttcattcaccttttgaaattctttaaagtacatcatagccattggggtacttgccttaccaccaccaacatgggttgtaaataatgcattgtacttaccttcattggaacggttacgccaattcttaaaaatatcctggacaactaagcgaacatggtcctcattttcatcatagaaactaggcgcaatttcatcgtccatgtcttcttgcgataaattatcaattttatcttgaatctgacgctgttcccaatcgggatgttgttttttatagaagtctggcaaatattgtgttttcatactttccgtatcaatcgtcgtctcaaaatcaactttaaagcctagtacgtttcgatcggcaatagcttctttaatggtataagcatgcagtaattcgccaaaaatatcctcagttcgtaacccattagttgtttcatcaaacataggtgtacccgtataaccaacccatgcagattttttaaagctcttttgcaataattcaaaagcatccccgccagttgaccggtgtgcttcatcaacaataaagacaatgtgtttatcaggtgacttaaaactcttacgcttaaccagtgtttctagtttttggactgaggtaacaatgatattgttatccttgctctttaatttccggcttaagtcgttggtactctgtgtcccttgcacactgccagagcgactatcatcatccactgcaccatcaggatcatacgctttgtaattttcattcgtttgctttgttaaagcaattcggtcaacaacgaaaacaactttatcgactcccggcattcggctagcaagccatgctgttttaaaactggtgattgtcttacccgaacccgttgtatgccagatatagccaattttgtttagtcccatatcaaaatcaacttttttaagtttttgaataacgttttgtgttgcataaacttgataagggcgcatcactttaatcatttgtttgttcttagtaccatccaaaatcataaagttagttgccatttgatgagccattggaatacttagcattgaatccgcaaattcgcgccagttacggacaatcttgttatctgatttccgttgccaattaaacgcaaaatctttgttaaatttgtcagctgttgtattggccatatatttaacattattcggcgtaatcgccaccagaatctgtaatgttgaaaaaatgtcagtgtattgattttctaaaatatattgatgcatctgattaagtgcttcattaacatcatgtgaatctcgtttctcttcaatttgaataattggtaagccattgattaataatgttgtgtcaaaccgccgttcttgcttcccagttagtaatgctggccgttcaatttgattgacgacttgatagactgtattaccagcgccaatttgtttctgatcaaaaacggttaaaaacacatgccgaccatcatctaaatcaatttcaatctgagagacaccatttaacccatataaaaattgaccagcatcatacggtgtttttaaatctgaaatgattttcttcacctgattaaattccatgacacttagcggattatcgagtgtattttgattatgctgctctaaaatctgcttaaaattagcccatagttgttcagttgttctaatatcgtctcgatactgccacagcttagtcttcacaacataatcttttgctgtttcacgaatattacttttttgaaaatcatcctcagaaactgttattgtcccacttgtaatatatttaattaattctgattcgaaatttaattcgttcattcactagtcctttcgcaactgattcattgctatttttagttttaaatccgcactttgctttctaaaccagtttaatcgtatttggttgaaatacattcttccaattaatcgttgctcatctattggtggtagtttattaattctcaacgcttttagctgtgcaagtgtatatttaataaccatcgttccttgtaatgaacttacaagctgtcttttaatattgtgatcctgattcaacaagaaaactaaatagtgagtatccaaatcctgattagggattaatttaataaaattttgagtttgtagatagccaacatgcttttttccaacaacacttgcttctccagaaactaaattaaaaataatatcgccttctgataaaatcataactttatcaggggtccgaatttgacgtccctcattggacgatgtttctgactgaactaaatcagctttcaattcagattgcccataaatacaataactgggatcactttcattcattgaaacaaatagacgagattgtggagagccactcacaaattcaacaaacttactaagtttctccattaaatcctccttcaacacttatttaatatgcttagtatacgtcgaatcaaaagtttattcaacaaattttatgtaattttttaaaattgcataaaatgtgtgcaaaataaaaagccttcatacttctccgaaaatttattttcagtgaaagtatgaaggcttttttacatcatatcaaacaacgataactgattttcatcaggcaggtcattcaatacgttattttctgttaggtattcgatcagtgtcttggaaactttcccacggttggataagtcttctttagataagaatggcttttcttcgcgggcggaaacgatttgtttggcgacgttaccgcccagacttgggacggcacggaatggcgcaagcaaggtgtggtcgtcttggatcaagaagtcagatgaatctgatttttcgatgtcgaccatcttgatgttaatcccgcgttccaaacattcgttggcgatttcgagaaccgtcaacaaattcttttccttggtgctggcttccatccctttatcggtgatttccttcatgcgcgctttgacgccttctttaccttgggccatggccacgaggtcgaaatcttcggcacgcacactgaagtaagcacagtaatagataattgggaagtacaccttgaagtaggcaatccgcaacgccatcaaaatataggcggtcgcatgggccttggggaacatgtacttaatttttaggcaggaatcaatgtaccagtctggcacattttcgttgtcgcgcatggcttgttgccagtcatccggaatccctttacccttacgaacccgttccatgatgttaaacgacatactatcatccataccccagtgaattaaatccatcatgatgttatcacgacaaccgataacgtcttttagggtaacaacgcctttgttaatcagttcttcggcattacccaaccacacgtcggtcccatgagaaagaccagaaatttgcaataattctgagaacgtcgtggggtgcgtttcttcgagcattccgcggacaaaccgcgtcccgaattctggtacaccgagcgtgcccattttcgaattaatctgttctggcgttaccccgagtgaatcagtgccggagaacaaggccatcacaccaggatcatcggttggaatcgtcttgggatcaatccccgataaatcttgcagcatccggatcatggtcggatcatcatggcccaggatatcgagttttaagatattatcatggatcgaatggaaatcaaaatgggttgtcttccaggctgcatcttgatcgtcagctgggaattggattggtgtgaaatcatagatgtccatgtaatccggcacaacaatgattccggccggatgttgacccgtcgttcgtttaacgcctgttgagcctttggcaagacgatcgacttctgcgccgcggaaagtttgttcggtatcacgttcgtaggctttgacatagccgtaggcagttttatcagcaaccgtcccgatcgtcccagcgcggaacacgttattttccccgaacaagactttggtgtagttatgcgcaaccggttggtaatcaccggagaagttcaaatcgatatcgggcactttatccccatggaacccaaggaaggtttcaaatggaatatcatggccatctttatcaaggggtgtcccacattcaggacagtctttgtcggctaaatcgtaacccgaaccgacttcccctttggtataaaattcggagtagtgacaatttggacagcgataatgtggcggcaatggattaacttcggtaatcccggtcatcgttgcgactaaactcgacccaacggacccccgggaaccaaccaaatacccatccttaccgctcttatacacgagcttttgcgaaatcaggtaaataaccgagaacccgttcccgatgatactctttaattctttatcgagacgtgcttgcacgatttcggggagttcatccccatataaatcgtgcgcacgattcatcgttaaggtttgaatttcatcttcggcacccgccatcttcggcgtgtacaacttatctttaaccggtgtgatttcatcaatcatatcggcgatttggttcgggttcgtcaccacgagttcttgggcaatatcggcaccaagaaaatcgaacgctgtcaacatttcatcggttgatcggaaatgaacatccggtaattgtgaccggttcaatggattagccccacccattgagtgaatcaaaatcttacgatagattgaatcttctggattcaaataatgggtatccccagttgcaaccactggtttatccaattcagcaccgagtttgaccatgttgcgaatgatttcttcaagcgcccgattatcgcgaactagttcacgttctaataatggtgcgtaaacggcttttggcattacttcgaggtaatcgtaatacttcgcgcgatcgcgtgcttcttggtagcctttttgcatcatcgcttcgaagacttcaccgctggcacaagctgaaccgactagaataccttcacgtaaggcatccaagcgactctttggcaaacgcggcgtgcgataatagtattcggtcatcgatgctgaaaccagtttaaataagttcttcaacccagcttgggtttgcgccattaaaatcgcatgcgctggccgtgcttgtttatacgcatcgccaatcccaacgcgatcattcagttgattgacgttgaccatcccatacatctcggccgcttcggcttctaatttgtataacaaataaccggttgattcagcatcggcgttagcacgatgatggtgttccaagttaattttataccgcttggttaacgtatcgagtttatgatttttgtattctggatgaagcatccgagaaacttccaacgtatcgatgacgggattttcaatctgaccgaggtcgttacgaccatagccagcattgataaagcccatatcaaacgttacgttatgcccagctaagacggcgtcgcccgcgaattctttgaacaacgctaggacttcggcttctttcttagcaccgtgcaccatttcattggtgatactcgtcaattgcgttgtgaaagctgataacgggtgaccgggatcaataaattcatcgaacgagccaatcacttcgccatctttcattttgacagcggccaattcgataatcgaatcgtaaacggccgataatccggtcgtttccacatcgaaaatcacgtattcagcatggtcgagcgcttcatcgcgcaagttatacgcgactggcgtgccatcattgactaaattgacttcgacaccgtacaaaatcttaacgccgtttttcttacccgctgcataagcatctgggaaagcttgtaagttataatgatcggtcaccgcaatcgcggattggccccatttagcggcttgttgaacaaagtcgccaatcttgttggtcgcatccatttgtgacatattggtgtgcaagtgcagttcgacgcgcttgccattttcagcggtatcttggcgtttgggatggctaacttccaccaaatcattggcgttgaccacgagatcacgcatgaagttatcttcttgaacactcccacgtaccttgaaccacatgcctttatcgatggctgcgaagatactttcgtcgccgttatcccgggagaatttcttgaccgtaaatgatgatgagtaatctgtcatcttcaaaatcaagagctggcggccagagcgtaaaacgcggacttctttatcaaagacgaacccttcaatgacaacggaacgttcttcttcattgattgtaatcatctgacgagttggttcagcaggatttaagccgcggcccattgaaatcgggccatcgactggtttaccttctgattgacgtttttctttaagtgcttcatttttcttgatcgcttcggctgccgcttgtgcgcgggctgcatcttgttcagccttctttgcttgaaaatcttcgattgccttttgtgaggcggattcgtcaatcaagggttgaatcgcaaacttgggaaaaccaagccgttgataaccagcttggattgtcgtttgcgcttgatttaagaagaacgtcttcacgatgtcgttttcgacaactaaaaagacgttgcgaccatcgatatagggggtctctttttcacacaattcgtgcaacattgaagattgaatcccactatggttgatgacgtattcccaataagctgctaaaacgccgccgtccaattcagttgcatcggtggtaatttccactgaaacgcccgcaatcgctttgaatgctgcttctaaatactgttcaaacgttgtgtaaacagcatatggcaaaacggattcgaaatgtaatttaaacgtccaccgtttggatgtttcgtggacaacgacttgttctacttggccagttttgaagccaggataattcgcaacatccgcgggtaaattaatttgttctaataatttttgaaacagtgcggtttgatctaatgccacaaaagggcctcctcatattcagaaagttaaataaaaggggctaggacaaatatcattctgtctcagccctttttagatgtccgaacatttataatgtaaacgcgctttttgaaactgcctcttgcgcttaactacaatccgcgaacgatcgacgttgtcgctcattcacgaatttaagttaatgcttggagccaaacggtttcaaacgcactctattcctaaacgtgcttttcaagctaactttctgcgcttagcgctgggaatcaaattatcgactgcgtcgttaattcgcttccctgtgctaatgctcaaaagttgaccgagcttgaacgcactctattcagcttctgttgtctctgaagccaataggatacttaatgaattaatcaattcatccttcttcacttctagggtttcacccgtcttacgtaatttaacttcgacgatttcttctgctgcttttttaccaactgtgatgcggattggtaagccgattaagtcactgtcggcaaacttaacgccagcccgttctttacgatcatcaactaagactgagtaacctgcttcttcaagtaaattttcgatctgttcagctaataagacttggtcagcatctttgacattgaccggtacgacatgcaagtcataaggggcaatcgcgcttggccaaactaagccgttttcgtcagcttgttgttccgtaatcgctgataagaggcgactcacaccgattccgtaagaacccatgataattggtttcgcacggccattttcatctaagaaagtggcaccgaattgttcagtgtaacgtgtgcctagtttgaagatatgcccaatttcaatcccctttgtaaagtgcaagttcccttgaccatcaggtgatgtttcgccttcttgaacgaaacgtaggtctgaataatcagctacggtaaagtcgcgcttgctgttgacattcgtgaaatggtgatcggcttcattcgccccaaccacggcattcaccatggcttcgacactgtaatcagcaacgatttgtaagtcttctggcgcgttaactggtccgattgaacccattggtgcgttcattgttgctaagacttgttctggggttgccatttctaagaaatcagcatctaagaagttcttcaacttcacatcattaacttcaaaatcgccacgcactaagaccaagaccggttggtcgtcagcgataaagaggacactcttgatgatttgttgtgctgggacgtctaatttagcagccacttcttcaattgtgtgggcatcgccagtcgctactttttcaagctctaattgcacatcacttgagttttgcttaggacggacactcgttgccatttcaaggttggcagcataatcactttggtctgaataaacaatcgtatcttccccaatttcagcaatcgcagaaaattccattgaatccttaccacccatggcaccggcatccccaacgattgcgcggaagtctaacccacagcgttcaaaaatgttggtgtaagcttggtacatttggcggaaagttgtatccaaatcagtttcattggctgagaatgaataagcatcttgcatgatgaattcacggccgcgtaataaaccgtaacgtggacgatcttcgtcacgatacttcgtttggatttgatataacgttaatggtaattttttgtatgatttgatttcattgcgcaccaagtcagcgaaagtttcttcgtgtgttgggcctaagatgaagtcgcggccatgacggtccttgaacttgaataagttatcgccataagtttcgtaacgacctgattcttcccacaattcagcaggtaaaatccctggcatttgcatttgaacggcgtcaatcttgctcatttcatctttgatgatggcttggatgttttccaagacgcggaatgctaaaggtaagtaactgtaaacaccagcagatacttggtgaatatagccggcccgtaacatcatccgatggctcttagcctcggccgagttaggcacttcctttaaagttgggataaataattttgactgtttcataatctgttatgcctccaaaaataatctaaaagaaaaagcgttgaatatcgttccatgtaaccaagaccattaagacgaccatgatgccgaccccgacaagggtgacaatgccttctttttccggtgagatgggtttaccgcgaatcgcttcaatcacgttgatcacgagcttaccaccatcgagggctggaattggaatcaggttcataatccccaagttgacggataagaacgctaagaagtagacgagcattgtaaagccttgactcgcgaattgcgtcgtcattgaatacatgccgactggtccggctagtttattgagtgaaaaaccacccgttaagaatgacccgagaattttaaaaatctgggtcgcattcgcccatgattgggtgaagccatatttcaacttagcccccacgctatggttgagtccagctgtcacaccaatttggccgactttccccttttgcccctcgactttcaccgctttaggtgtgatttcgagtgacttagtttgctttgcccgtttaacctggacattcactggtttattcggatattttgcaatcaccgagctgaaatcagtaaacgtcgtgacttttttgccagcaactttcactaaccggtcatccattttaagcccggctttttgtgctggcgagtttggcatcactgtgccaacaatcgctttgttttgtgggacgccaccgtttaaaaaagcaaagagcgcaaacgccacaatcgcaaggataaagttgttgaacggtcctgcaaagttggtcaacatccgattgattaaactagccgactggaattgaacatccacgggtgcgatttgcacttccgttccgtctgattcaacaatcgttgcatcgtgactgaccgaataacgctttaattcggattcgtcaccactttcatagccttcaatccataattctttttgcaagtcagtttttgcaatttgaaatgggacaccgtttaacgtggttactttgtcacttgtattaattttttgaacagtttcttgttcgtctaacagcaaggttgcttgcgtgccggcttcgatttcagattcatcatccgccatccccgccatgcggacatagccgccaagtggtaaccaacgaatcgtataagtcgtgccatttttgcgcgttgcaaataattttggccccatgccaattgaaaattcacgcaccaaaataccagaacgtttcgccatgtaaaagtggccaaattcatgcaccactactaaaatgccaaatatgataataaacgcaataatcgccgccaatagagtacgactcccttctaaatgcgtatttcaatactctcatttgatatgaactgttatattatatcacgaattccttagaaacaagaaaagcgtttagcgcaaaccaaaaagttgcgctaaacgctagataatattgacttttaaaaacgtgctttttggttgcaacaacttccgcttaatctaaaaattcaaacaatcctaaaaccgggattattcgaatttttgtattaatgctcagttgctaaccgccacaaacgcactctaaatcatgccaaacaagtgtagtagcggtaagacaaacaacatgctgtcaaagcgatctaagatgccgccgtgacctggtaagattttacctgagtctttaacgccataatagcgtttgtaagctgattcgactaaatcgcctaattgaccggcaattgagaagatcaacgttaaacctaacatgacaggcattgaataagcttgtgggaagaagtttaaataaatagctgcgaccactaatgctgataatgtcccgccaattgaaccttcccaagttttattggggctgatagctggccacattttattcttaccaaacatccgtccgaatgtgtaggcaccgatatctgtcatccagatgaccaataagatatacatcacagtgtcaaaaccaccaatatttcgcgttgcggctaaataatggaagcctaagccgatatagagactggctaaggttgtgacacccatatcatcgaagttaacccggtttttcgtgaagactgtgatggctaataaaatggcaacgaagaagtagaataaatcaaattgtgacacacctgctggtaaccagttaaaggcgcctttgggtgaggctaaacttaacaccgctagtccggcgatggttgcatcaggtgagacaataattcgtttacgcatgatgaaaacttctgataaggcaacgagtgctaaaacggctgccgcgatatcaatgtaaataccaccaaagaaaatgatggggataaagatgattaaagcaattgttgctgtaatgacacgttgtttcataattgtatttcctcctatttaagaccgccaaaacgacgattacgtttttggtaagcgccgattgagcgttcaaacactgctggggtaaagtctggccagaattcatctacgaaaacaagttcgctgtaagcaatttgccagagtaagaagttcgaaattcgctcttcgccactcgtccgaatcaataattctgggtcagtatattcccctaaaaagccagtcatcaagtaatcactaatcaacgcatcgtcgattgcatcgacctcaattgtaccatttaccgcatctttagcaatctgcttaaccgcttgttggatttcgtcacgcgacccataattgagtgcaaagttcaaaatcatccctgtgttatcagccgtatcggccatcgcattgttagccgctttttgcgtcttttctggtaattcttgaatattacccatgactttcacacggacgttttcagcaatcaattccggcatgaacgtatcaaaaaaatcgaccggtaactgcatcaagaagttcacttcgtcatttggacgcttccagttttcagttgaaaaagcgtacaacgttaagactttaacacccattcgactggccgttttggtaatcgtcttaacgttttccattcctgctttatgcccagcgattcttggcattaagcgtttcttcgcccaccgaccgttaccatccatgatgatggcaacgtggttggggatattggtgggatctagttgttgtgcgtctgtttttttatttgtaaacaccacatactcctccagtttcaataactctcatatgattgtaccaaaaatcacaggaagtgactatttaaaatcaaccgattgtcaccggcattgtacaaactgaaccgcccattctgcactttttgagttcttcccagatgatttttatccacgattaagcctttaataccaacgattcccgccacaacgtactgttgccgctatcacattgaaatttattgttaaatattagtagattcctatagttattggcatgtaacaggttaaatatgataaactaatacataccttaaacagaaaaagggagtttattatgcgaaaaaccttcgaactctttcgacttgattggcgtcgaatcttaaaaagcccgatcgctcttctattaattattgccctcattatcattccatcgctctacgcgtggtttaatatctgggcgttatgggacccttatagtaaaacgcaagacttaaaagtcgctgtttactcagccgatcaaagtgttgtcattgctgacaaaaaagtcgagattggcgccgaactaattagccaattaaagaaaaacgacaaattaggctggcaatttacttcgagcaaaaaagaattagatgacggcgtaaaaacggggaaatactacgccgggatttacgtgcccaaaaacttctcaaaggatctcgttagtttcgtcgatggcaagattcaaaagccaaagatagtctactcatctaatgataagattaacgcgattgcgcctaaaattaccagcgcgggtgcaactacgcttcagtccaccatttcagaagaattcgtctcaaccgttggtaaaacattgatgagtaccctaaacaaggccgggattgatctcgatacaaatctccccgtcattaatcgtttctcgagcctcattctcaaaacagaccaacaaattccagaaattaaccaatacgcagaacaagtgcttaatctacaaaagaaactaccggaaatggaattaaagcttgcccaagccaacgagttcgcggcctttttaccacaagcaaatgccatggcgcaaaaagtagtcggcatcaatcaatacttaccacaagttgaagcagccggtcagctcgcaacgaaagttcaggctaagattccagaaatccaaagtgctggcaaacaagttgccacactcgattctgatttcgatggcatcgccaatactttaacgaacggcattaacgaagctcaaactggtttagatgtgttaaacaaaacacaaaaagtcttaccggacttaatgacttttagccaaacggcccaaggtgtcgcgggtcaattacaatcagacttaatccctaaactccaagctgctttaccggtcattcaaaaaacggtggatcaagggttagccattaccaatcaattggcaactaacatttcaactaatttaacggccgtcaatagtttgctgagtcaactcaaagaggatcccaataatgctgaactcaagcaagcgctcaaagaagcgctccagaacttatctgatcacaccgctaccttgcaaacccatgcgactcaacttgcgacaaccctccaaaacttgcaagacagctacaatcagtcagcagtggcgaatggtcaaccggaatcacatgcacttgatacaccgattaaacatttaaatacgttggcgacccaactcggcgtttttaaaggccaagttgatgaccttctcgcccattacgatgatttatcaattgacgatttgcaaaccaagattaatggtttgattcaatacgccgaccaagtcgaagacagcgtcgctaagattcaagcggcccatatcggtgacagcgtcaaaaatatgctcgaccgcttttcaacattaattgctagcggtaatgccgtcttaacacagcttaacggcgaagttttaccgaaactccccgcactcttattcaacacacaaaagacgctccaacaagccatcgactatctgcaaaaatatgctcagcagttaccagcgttgaaacaagaaattcatgacgcgaatacattattaaatggcaatatgggcacgattatctctggattaaacaccgcttctgacgtttaccagaatgattacccactactcaaaaataaactgcaactggcaaccagtttcatcaacaatgacttaccaggcatcgaaaacgacttaacaacgacgctcaacatggccaacgagaaattcccactcgttaaaaccgccttaaatgatgcgaccaacctcatcaacaatgattggccattcttacgtagcgggatccaaaaaggcgctgaggcgattcgcaaacaacaaaagacggtcgatctcaaagatctgattaaattgcttcgccgcgatgcaactaaggaaagtaatttcttagccaaaccggttgaactgaaagaaaaacacgtctacccgattaagacctatggctcagcaagtgcgccgttctacacagccctttgtctctgggttggtgcacttcttttgagtaacatcgtcttaaccaacttcgcgttagacgacaaacaaaagaatcagtacactaagaaacagcaatttattgctcgctggctaacctacatcgtcattggtatcgcccaagccgtgattgtgacgcttggtaatattttcttattgaaggcctacatcgttgataaactaccgctaatcttattagccgtcttcctgagcatggtcttcatgacaattgtttacgttctcgccgcgatgttcgggaacgttggtaaaggaattgcgatgattgtcttggtgctttccatctctggcggtggcgggaacttcccagttgtcctctccgatcaattcttccagtttattaaccccattttaccgttcaaatacggggtcaacctcttacgcgaaccaactggtgggatttacgcaccgaacctctggcataactttatcatcctagcgctctttgcggttgttttcttcctaattggcctcttcctgaaagatcgaatcaatccattctttgaaaaactccacaaagaagcgacgaagagtaaaattattcattaacgcaaaaaaagccccgccactgttgtggcggggctttttgcatccattagggattaaccttctgtgatttctttttctttgttcttggcgatttcgtcaatcttcttcgttgcttcattcgtcaatttttgaacttgttcttctaaatcatgcatttcatcttcactaatctcgcttgctttttcagcttttttcaagctgtccattgcatcacgacgtgcatttctgatggcaactttgccgatttcagcttctttaccaacttctttagcaatttccttccgacgttcaccagttaattgtggaattactaaacggattactgagccatcgttggctggtgaaatccctaaatcagctgtataaagagctttttcgatatcttcaagcgcacccttgtcataaggggtaatcaacaagacccgtgcttctgggactgtaattgcggcgatttggttaagtggtgtcattgcaccgtaatactcaacattcacgcggttgaccaagcttgcattcgcgcgaccagcacgaatttggcctaatgttctttgtaatgaagcttctgctttttccatgcttgcttttgcttcatctaaaattggatttgccatattattctcctccttcgatcgttgtcccgatgttggcaccttcaacaacttttttgatattgtttggttcgtttaagttgaagactaccaatgggatatcattgtccattgataaagtacttgcagttgaatccatcacttgcaagcctttgttgataatatctaaatgtgttaatgtgtcgaatttaacggcacttgaatcagtgttaggatcagcagagtaaacaccatcaacgttgttcttagccatcaagatcacatctgcatcaatttcagcagctcgtaatgcagccgttgtatctgttgagaagtaagggttccctgtcccaccagcaaaaatcacaacgcggcctttttctaaatgacgaacagccttccgacggatataaggttctgcgatttgacgcatttcaattgatgtttgcacacgcgttgggacaccaatgctctctaagttatcttgtaaagctaaagcattcatgaccgttgccatcatgcccatataatcggcttgcgcacgttccatgcccatttgttcaccagtcacaccacgccagatgttcccaccgccacagacaatggcaatttgaacccctaaatcgtgaactgatttgatttcgtttgcgactactttaacaatttcagggttaattccgaaaccttggtcgccagcaagtgcttcaccactcacttttaagacgatgcgtttgtattttgtatttgacatgattgatatccctccgttgattactaggctcattttaccatatttaataagttatttgggtatgcgattctgaattatcgtaaaactgcaaaaaaaaggagcgcaaattgcgttccctttttgaagcaaaataagcttatttgatttggcccatgacttcatcaacaaagttattttcttttttctcgatcccttcaccaactgtgaaacgaacgaaacctttaacgctaccgttcttagatgcaacaaattgtgcaacagtttgatctgagtctttgatgaaagcttggtcgttcaagctgatttctgacaagaacttgttaacacggccttcaacgatcttaggaatgatgttttctggtttgccttcgttctttgtttcttcagttaatacttcacgttcgtgagccaatgtttcagcaggaacatcttcacgagaaacgtattgagggttaacagctgaaacgtgcattgcaacgtcatgagctgcttcatcgtcagcaccttctaaagtaactaatgaagcgatttggccaccattgtgtaggtatgcgccaaagtgatcgccatcatttttttcaactaattcgaaacgacggaagctgatcttttcgccgataacagcagttaagttgattactgagctagcaattgtgccttcgcccattggtaatgcttctgcagctgccatgtcagctggtttgtttttagcgattgtttcagcaatatctttcaataaagctttgaattgatcgtttgaagcaacgaagtcagtttctgagttcacttcaacgattgcagcagtgttaccatcgatggcgatgcctgctaaaccttcagcagcaatgcggtcgctcttcttagcagcctttgccatccctttttcacgtaaagcatcgattgcttgagcaacgtcgccgttactttctacaagggcttttttagcgtccatgatcccaacgccagttttcttacgtaattccattacttgagcagctttaatttcagccataattcatacctccgacaatttatattcaatataattggtttaaaaaaagctgtcccacaagtcaggcagtatttgcgaaacctctaagacagcttatttgaatctactatttagcgtcagtgttagtatcgttgtcgccttcaactgcttcaacgatttcttccattgagtctgctgatttgttttctgcagcaaatgtagcttcttcaacatcatcttcaccttgacggccttcgatgatagcatcagccattttagctgtgattaaacgaacagcgcggatagcgtcatcgtttgatgggataataacatcaatatcatcaggatctgagttagtatcaaccatagcaacgactgggatatttaatttttgtgcttccttgatagcaatgcgttctttacgaggatcaacaacgaacattacgtctgggatgcgaggcatatcttcgataccgcctaagaatttttcaagtttttcttgttgtttcttcaacaaggcaacttctttcttaggtaaacgatcgaatgtaccatcttcgtccattgctttgatttctttaagacgtttgatccgtttttggattgtgtcccagttagtcaaagtcccacctaaccaacggtggtttacaaagtattggcctgcacgtactgattcttcagcaattgcatcttgtgcttgtttcttagtaccaacgaataagaatacaccttcgttagcagcttcttctttaacgaagtcataagcatcgtcaaccatgcgaactgtcttttgcaagtcgatgatgtagataccatttctttcagtaaagataaatttcttcatttttgggttccaacgacgtgtttggtgaccgaagtgaacacccgcttctaataattgtttcattgacaatacagccatgtcaacagacctccatatggtttttttcgaccactggtttcacttttttagagaacttgtcgccaagcacctctctagaaatcaaccagtgtgaattattttttggtattgaaataccgtttaaaagtatactaaaaataacaaggcgcgtcaacaagaacttacatgccgcccaattgtttctgataacgggttgcatcttgtggttggtggctcactgaggtaacgccactcactgtttcaaccgctcgatagcccgcttttagcgcgacttgctgactcgccacgttttcgtgtgcagcaatgatactcaactggtcaagttccaattcactggccgcgtattgttcaatggcggctagtgcgcgatgcatgacacctcgtccgcggaaagcttcatctaaccaatagccaacttcacccgcacgatccaagtcgtcaatattgtgaacatcaatcgtaccaactaactggtggtcatcccaaatcgttgccatccaaagttcctggtttgccatttgttgttgcgcatattttaaaaagccaagttcatcggccactgattcgatatcgcccacccatggtaaccaagtatcgagattgacgcgattttgatccactaactgaaataacgccggcgcatccgcttccgtcacaggttgtaaatgaatgtgttgatcgacaactaacttaggttgcatattggtctctccattctaaaattgagttcttgaaatgccatgttccattaaatattgttcttttttgcggcggggttgatgtttgaacgcatactctgctttaagcgccgccgatttatcactaaacgtttcaaaatataataaccgcactggtcggcgcaattttgtgtacttcgcacctttgccagcattgtgcgtggcaacgcgtttggtaacgtcggtcgtgaaccccccataaaaactatgatcggcgcagactaatacgtaaaaataataagccttctcagtcattgtcagccatgaataacttcgtgcgcatctctggtgtatagtggctgtcttggtcataaatcgtcagttccggaagcattcgtaagcccccttttttaccatctttgaccgcttcaattaacaccatattcgcttctttgcctgctttgggataaacaaaccggacgcgtttgggttccatgcgtgcggcgcgtagttcgtcacagatttctaagaaccgttcgggacggtggactaaataccctttaccattcatctttaacaggccactcatggtttgaaccacagtgcgtaagtccgttgcaatctcatgccgcgccagtgccagatgttgattgggatttttttgactattgggttcaaccttaaaatatggtggattacaggtcacaatatcgacgctgtccttatgaatcttagtgttaacgtctttcaaatccatattgagcattgtcacctggtcggttaagtcatttaattcaattgaccgttgtgccatgtcggccaaccgttcttgaagttcaacaccgataatttgaccatttgttttgggactcatgaataatccaaccgccccattgcctgcgcacaaatcgacaatcgtcccgcgttttggtaactgggcaaagtcggctaacaacaccgcatccatcgaataggaaaagacggatgggctttgaataatctgaatatctaagcgaaataattggtcaattcgctcatctgcttttaacatcgttctaccttcaacctcatttgtatttaggcatattataacaaagagtatcattatttggtataatgagcagatactagtcacgtttgaaaggaatctaaactatgtttttctcatttgcacgttttatcgtccgcattttagcctggttattgaatggcaatttgaaggtcgaaaataaagaagccctgcccgaagggacttatgttttagttggcccgcaccggacttggtgggatccaatcttcttcgcacttgctgctagtccccgaaagttcacgttcatggctaaagaagaactctttaaaaacccaattttacgcttcatcttaacccacgcaaacgcatttcctgtgaaccgaacaaatcctggcccatcggcgattaaaacgccagtaaaagcccttcgctcaaaagaactttcgttaatcatgttccccactggtagccgctattcaagcgaacttaaaggcggcgcggtcgtaattgccaagatggcgcgggtcccactcgtaccagcagtctaccaagggccattaaaattctctgatgttttaaaacggaaaaagattacgattcgttttggtgaaccaatcccaatcgatccgaaattaaaactcaacgaagagaacttagaagttgtcaatcatcaaatgcaagccgcatttgatcaaattgaccacgaaattaaccctgattttaaatatgaactacctgataaaaaataataacaaaaaactgctagatgatatcatctagcagtttttttagcgcgttaaattcttaaccgcattcgtcaccaatagataggccgtaactaatgccactgcaatccagccaaattgtgttggaatcgcttggaaatcaacggcttgtctgagcggtgtcaataccagaatacctccaattaacaaactgattaaactccccaagtaaacacgccaatttgcgcgatccttggacggtgatgctggtgtccgtaatacataaactactagcatctgcgtcaataaaccaacgacgaaccaactcgcttagaaagccccctgttgagctgatgtttgcaggccaaatccaaaccagagaatcgcaaacgttaaaatatcaaccattgagctcaacggtcctagaataaacgcactcttcagtaagcctttagttgcccactgtgttggttggcgcaattgatcttcagcaacccaatcccaaggtaaccagagttgtgcgacatcatacagtaaattctggacaagaatttgcagtgacaacattggtaaaaatggtaaacagatgctggcaaccagcacgctcaaaacatttcctagattagaagctaacgtaatccgaatgtacttatacatattgataaagactctccgtccttcaagcaccccgtgttctaaaacattcaaatctttttccagtaggattacatcgctagcatcctttgtgaggtctgcggcattatcaactgaaatcccgacatctgcttgtttcaaagctgtcgtatcattaatgccatcgcctatgaaaccgacgacttccccttgtgcttgtaataaacggattaaacgcgctttttgaagtggagccaatttggcaaataatgcttgctcggttaatagctcactgacttgtgcatccgttaacgtctctaacatctcaccagtggtcacagctagattctgaatgcccactttttgggcaacttgctgcgtcgttaaagcactgtcacccgttaaaattttgaccgccacttgatgagcttgtagttgttgaattgccgagatagctgattgttttggtgggtccaaaaagcccaaaaagccgtcgaaaatcaaaccttgattaccaacgtggtcaattgatgccgtctctgctaagtcatcttgataagcaaccgccagcatccgcatcccttgttgtgccaaacgatcatgcactgccactaggttctgcttttgcacttcagtcaacggctcaatctgatccgctaacctgacttgggaacacgttgctagcacttcttcaaaggccccttttggcactaattgattacctgcatggtttttgagccagaccgttagccgccgccgctcgaaattaaatggaatctcgcccaatttttaatatggaaagtcatcattggtttggtcttgttcatagtaatgaataatcgcttcatccagaaggttctgccagccggattgacccttggcgttcaaatatgctaatcgcaaaacttgcacatcccgctttcctaaaatatctgcatagtacatcaatttaatatgatcttccgtcaacgtccccgttttatccgtacataaaaccgacatcgccccgagattctgaatggcctttaactgctttacgatgacctgttgttgacttaaaacgacactgcctttcgccagattactattgacgatcatcggtaacatctccggtgtcaaaccaactgccactgcaatcgcaaagaaaaacgactgttgccaatctcccttagtcacaccattaatcacaaatacaaagggcaccaaaacgagcatcatgcgaattaataaccaactgatgtgttttaaccctgcattaaattgattcggtcgcgacttaggttcagtagtcacaattgcgctaaagcaagtcgcttgacccgtggcaatcactaacgcggtagcttgcccattgacaacggtgctgcccatcagcaataaactcgccatatccgccgcattcgttacgtcagttgcttgcgctgttatgcgtttgctcacgggttttgattcacccgtcaaagaagattgattaatttgtaaatcatggctcgccagaatttttaaatcagcattcaccaaatcccccgtctgcagctgcacaatatccccaggtaccagactttgtgcggcaacttcagttggttgaccctcaattacaacccggctggtctttgccaacatcgcttgtaaagcaatgctcgcttgctcggacttgcgctcttgcacgaatcgaatgctactagacacaacaatcatgattaacataactatcgcgccatcaatatctcgactgagccaggagatgatcattaagacagctaatacgccgataaacggatcttgcacgctctgccaactagctcgcaataacgaacgctgttgccgcttttgaatcgtattttccccataggtttgtaaccgtgctgttcgttgctgccgtgataaccccttcttgtcagtttcgaaatgttctaaactcgcttttggcgttaattgattaatctgattgagtgtcattttaattgtcttagccatcgtaatccctctcattcgcagctgatccgcataaaaaaggcatcctcaaagaaaggatgcctcacaagaaaaacaagccattccaatcgttgagctttagcactatatgacgtagaactttgttcagctacattagaaaaagccttcagggcagtttctgttgactcaattggcatctctcgatgtttctgagtagcagcgtttgttcatataggagcctcacctaacggattagcgatatcaatatatttatatatctatcataccaaatcgacttcaaaatacaattaaacagacttattgaagatattcatttaaaaattgcgcaactttattacgataggttgttggatctgtagccaaggcttcaccatgagctgcccccgaaaccacccagagttgtttaggtgcatgcgccgctttgtaatttgtatacaccattttggttggtacaaatttatcttgatcgccatggatcatgaagattggcaatttcgagttagctaaactcttagcagtatcgccatcattaaagttatagccggcgcgaacccgtgccatccaattcgttgtgtaaaataacgggaatttcggcaatccaaagagatcgtttagttggtatgcgagttcgtcagcgatgctattatacccacaatcttcaatcaccgctttcacctgcttaggtaattcttcacccgcggtaaacatgacggtcgcgccacccatgctgaccccgaaaagggcaatttgactatcctgtccgttggtagcgacaatttgttgggcccacttgacgtaatccaagcgatccgtccaaccatagccaatggcatcgccttccgattcacctgctgcacggtcatccggcgcgagaacgttgtagccaagatcgtgatacatgtgaatatagcgtgccatatcctcttttttacccatatagccgtgcgcaactaaaattgttttgttcgtaggttttgttgctggcacataaattgccgccaattttaaatcatctgtggcagattgttgatgccactttgattgtttaacattttttaaccaacgttgattgtcttgatagactttcgttggcttaccaccatttaaaaatgatttttgccccggtacaaatgcgtattgatacatatacatagtggcaccaaatagtgctaccaccactaagacaacaacgctaattaacgaccatttcagccagcgtcttttcttcatgtgctaaattcctcccgatttactccgcaataataatagtcgtgtttttttgaaactgcttattcttcactgccaccattttggagttgatacatttcataataacgtcctttttgagccactaagctatcatgattaccccgttcgacaatctgcccttgatctaaaaccaagattaattcagcatcgcgaatcgtcgatagacggtgcgcgatggcaatacttgtacgtccttgacgtaaccgagcgagaccagtttgaatcatcgattccgtttccgtatcgatattagccgtcgcttcgtccaagaccaagattttaggatttgtaaccaatgttcgcgcaaacgaaattaattggcgttgtccacttgaaaattgggcgccaccttcaattacacgagcatgatattgaccagataattgttcgataaagtcatcagcttgcacgaattcagccgctgcgcgaatttgggcatctgtaatctcttgattaaataatcgaatatttgatgcgacatcaccataaaacatgaatgcatcttgtagaacaagccccatcttgcggcgcagttctgctgtctgaaaactccgaatatcatgtccgtcgattagaatctgaccttcataaaattcatagaaccgcatcatgacattaataattgaacttttcccagaaccggtatgcccaactaaggcgacagtttgtccaggttcaacaacaaatgagatgtcatgcaaaatttcatttttcccatcgtatgaaaacgaaacatgcttgaattcgacgcgaccctcagtaatttcatttgcagcatcggcattttgagctggcgcatattcttcttgatcgagaattctgaaaattcggcgaccagcgaccattccatcttgtaatgatgataaagaatccatcatattggtcatcggattaaagaagttcccaacataggttgtgaacgcataaaccaaacccgccgtgacaaagctatgcagggctgagacaccaaacaagctcaagacaacgaccaatgccagtgtatagagtaaattcacaattggtgcgagcaacaacgagttcgttcgaatcatcgcttcgcgcgtttttaaatagtccgcgttaacttgttcgaattcgtcggtcaaccgtttttcctggcggaattgttggataatcgtaatcccttcgattgattcgttgagtttcgtattcaactgactcaatttttcacgcatatgccggtaaacccgcgcactgtaactactgtaataccagataacaattaacaatattggtagaaacgctgccgttgcaagggcaatttttggtgaaattaaccacatcgcaatgaacgctgaaatgattgaaaatgaaccgactaacaaggataagaaaacattccaataatcaatcaaagtcatcgtatcattcgtgacccgcgatacaatcgagcctgctggcgtctgatcgaaataacgcatcccgagttgatggagcttctgaaataaatcgcgccggacatcttccatcgcgcgttccgaacccattccaaaaaggaaagattggaaaaattgtgtaatggctttgagaatcacgcctaaaccgtacaacgccgcaacccccattaaaacttgggtggtcgcactctgattggttaagtaacgatccataaagacttgtagtaatcgtggtaataaaatattgatggtcgctaaacctgcggcggccacaattgcgccgataaattggcgtttatagcgtttcgtataaccaaagaggcgtttcatgatgtgcaattgctctttcaatggaactttcttggaccattctgattgatattgcttggccatcttatgcacctcctaaggcttgacttaattgttgcttcaaccacatctctgcgtaccagccatctgcggcaaggagtgcttcgtgtgtcccacgttcagtgatttgaccgtcatccatgacaatgatttcatcggcgtgcatcacactactcaagcgattagcagtgataatggtggtttgatcagcccgcatcgttttcaaattcattaaaatcgcttcttcagtctttgcatcaacggctgatagcgaatcatctaagatcagaatttctggatcagtcataatcgctcgcgcaatcgcaattcgttgtttttgcccaccagataacgacacaccgcgttcaccaacgaccgtttcataaccttggacaaacgttaaaatatcatcatgcaccgcactcgaaatcgcggcatcttcaaccgccgcttgatttcggtcaaaatcagcaaaccgaatattgtcgcggacatccgttgaaaataagaaattatcttgtggcacatagccgatactatcaagtaacgcatccagcgaataatcccggatatcgtgaccatcaatttgaatctcgccttgatactgatcatattcacgcaataataatttaatcagtgtggttttacccgaaccaacttttccgacaatgcccaacgttttaccttgtggcagagtgaacgccacctgtttgagcgttggttgtttttcgccagggtacgtaaatttttgaacagcataatgaatatcgccagttgctagtgtttgaatcgcatccggtgcttcgacaatggtgctggtttctttcaaaagttgatcaacccgatcataactcgcattgccccgttccaagacgttgaacaagcgcccaatcgcaaacattggccaaacaagcgccgcgatataactaatgaacgaaatcaattgaccaatcgaaatgctgtgattcataaccaacgtcccgccataaatgattgttacaatgtacgttaacccgataatcaaactgatggcgggatcaaataaaccatcaatcatattcacacgtttattaatcgcaattgtcttcgtgacaatctcgttgaaatctttaatatcagcttcttcttggccaaacgtttttaagactttaatcccagagacactctcttgggttttatcattcaaccgtgaaaaagccgcctgtgattgcccaaacgctgtgtgtaaatgtgcacctaaccgtcgtgacgcaacggccaacaagggcattggaatcaaggccatcaacgttaagcgccagtcaacgaaaatcaccatcgcaataatcgttgtcccaccagtgatgattgaatcggcaaaggttaaaataccggcaccagccacttgttgaatcgcggttaaatcattcgtggcatgtgccatcaagtcacctgtccgatgtttttggaagaaggtcgtgtccatcttcatgaaatgccagaacaatcgactccgcaatgtccgttccagtttagccgcgccaccccaaatccgggtccgccaaccatagcgaaaaatatattgtaaaatcgctgcgcttaacaagacgccgagccacatgattaatttttgggccgttaattgtttggcatccattaaatcaaccagggtcccaatcacttttggtggcacaatttggacaatcgccacgaggactaaaaagatgacgccccataaatagcggcggtattcttgtttaaaataccaccctagttttttaaaaattcccatgttgtgctcctatcctctaaaattcgataagtcctattataacaatcttaattaagccggacaatcatttgtatttccgttcttattatgataaaaaaagagcttctaacaaacgacttgttcgttagaaacccttttaaaaccgacttgactgttttattttttgttgctacgtttttgttgtgctttcattgagctcatcatctgatttaatttcttttcagatggtttttgacccatttgcatcatcatagcctttaacatttcttcgttaattggtggattgtcttggaaatacttcttcatgtaagcacgtgcgccaaagaaaccagcgactgcgcctaataaagccccaatgacaaataataaaatgcctaatcccatatcttatgcaccccttcctaattcagttcacttaaatagtttacacataattaacctaaaaagaaagcggaattctaagattaatcgtcacgcaagcctttttcccgttggatatccttcactttttcaggagtgacttccttaccttctttgtcatacacttgtagcatctcaacttgtgagcggaaactttcgcggaaatcctttaaataggcatcgcgcagtgtttgacgttctgctgtttcagcttcagttagtccttcagcttttgctttgtgtgctaattcattaattcggtctaatcgtttttgatccattgccatcttgttgccctccaattcaaactatttgtctattttggactaaaatccgtaaaatgtcaaaaaacacgaacgcttgtttgaaatcccgctataggtatgctaacatatagctattagaacaaatgaggtgctcttatgacgagaacagaatccaagcaattagaggtcttgcgttttatccatgaccgcgttcaagataaaggttatccgccaacggttcgtgaaatttgcgaagccgttaatttatcctctacttctaccgttcatggccatttagcacgccttgagaaaaaaggctttttacaaaaagatccgactaaaccacgtgccattgaattaacagcagctggtttgacagcaattggcgcatcacagaagaagattccggttctcggtgttgttacagctggggtgcccattttagcggttgaagaagcgaccgattatttcccgattccaccaagtctacaaactgaacaagatttgttcatgttgacgattcgcggcgaaagtatgattagtgccggaattttagacggcgatgaagtgatcgttcgtaaacaagcgactgccgataacggtgacatcgtgattgcaatgactgctgaagatgaagcaacttgcaaacgattcttcaaggaacctgatcattatcggctacaaccagaaaacgatacatttgaacctattattttgaatgaagttagcatcttaggtaaggtcgttggcctataccgcgacagaatgtagctatcaaaaaaggattcgccgttatggcgaatccttttttagcatgttccttcagccaggtccttacgtttagcgactgactgacgttacattttttcttaacgtgctttctgatgcaatttcttccgtctagccacgtcccgcaaacaacccgattgcatcggttattcaccaacctaagttaatgatcagactctcccagcttagaaagacatccattaataatccattaatttgaagatatcgtagtctttaattttttcgcgaccgtttaaatcgtttagttcgattaaaaaggctgttccgacaacaatcccacctaattcttcaaccattttgatggttgcggcgattgtgccgcctgttgcgagtaaatcatctgtgaccaacactttttgaccgggtttgaccgcgtctttgtgcatgtataatgttgattcgccgtattccaagccgtaacttgctgagacggtttcgcgtggtaacttcccctttttacgggctggtgcaaaaccaacgcctaatttgtaagctactgggcagccgacgatgaatccgcgggcttcagggccaacgatcatttcgacccctttactctttgcgtattcgacgatcttgtcggttgctgctgcatatgcttcaccatcagacatcaaaggtgagatgtcacggaatgtgacaccttcttcagggaagttgggcacacttgcaacgtaatctttaaagttgattgccattttaaattcgctccttaactctttcaacagtttgctactgattgaatcctgccagccagtctttcatctccgcgaaggttgagtaaacaagctgcttttccatgtcaattttagctaatcgttgttgataactcggtgcactttctaatgcgtgcttttccggttgttccgcggccgaaatgagaccacattctattttaacaaatcctaagtcaaaaaacacctgcaacataaaaattaatagcggcaatttaatttttagataagtcgctaattcccctaaccgtgctttttcaattcctggatgttgacgtaggtaaaccaagaaagtcgcaaactgtttcttatcaggaataccatcaagatatgccgaatacttactatagaagataaagctgattttagtggcctgttgttggcgataaaaggcttcaaattcatctaaatcagttggttcatcaaccacaatcaattctgcttgctgtgcgacatcggctgctaagatggcttggctgccggctgggatataactttgtagctgtgccagatgcttctcattgaaaaagacataggtgccactagctttaaacaactgttgcgtcaaccgattactccgttgatcgattaacacttgcccactcgtttgtaaatctttcagcatcaattgcaacgtcgtattgccgcgccaagtattctcacttagttgaccaactaatttcaactgttccaccgcttgtaaatcgtcgtacaacgcaccacagttaaatgctaagactgctaactgcgcttcttgatcaaccgccgtaaatttcaaatgcttctgatccgcaccgatctgcttcacattggtgacggatggcaccgtcatttcaatcaaaggttctgggttatccgtgccataaggagctaattgactgatggcttgataaacatcgggcgtcacatcagctaatgcgagctgtaaatcaaccgccaatgtgggtttcgttgttaaatcaatctgattatcagcggcataagtattcatcgccgtttgtaaagcagccaattgatcgactggcatcgttaagccgacagccatatgatgcccaccaaagtgcgtcaacaatgtgcgttgggcatcaagcgctttaaagagatgatatgcttcaacacttcgtcccgatcccttggcttggccagttgctagatcaattgctagcactaaagttggcttaccggtttgttcaacgatatgactcgccacaatccccagcacaccttcatgccagccttcatgtgccaacactaaggtcgcactagcttggttctcaggtgtttgtgccatttcgctagctagcgcagtaatttcttgcacaagaccctggcgctttttattttgttgttccacaaattgggcctgttccaccgcttgttcttcatcgaaagtcgttaatagattaacacctaagttggcatcacctaagcgaccaatcgcattcaaacgtggcccaatcccaaatccaatcgatgtggcgtcaagcgtttcttgttcaatacccgctgactggcaaagagccactaaaccgggacgactggtattttgtaattgttgtaagcctaagctaactaaaacgcgattttcatcagtcagtgacactaaatcacagaccgtcccaatcgccactaggtccaaactctcgtaagggatttcttccaataatgccgtagcgactttaaatgccaccccaaccccacataaatcactaaagggatactgtccctctggatgacgggggtgaatgattgctgtcgcatttggcaatgtacttggtagttcatggtgatctgtgaccactacatcgacaccgtgttcttgcgcataggcgattggctctaagccactcaccccgttatcaacggtcacaatcaactgggtcccattttcaacgagttgcttatagacatctaaattgggcccgtagccatctttaaaccggttgggcacatatacttccacatcggcgcctaaactttcgagcgtctcttgcatcaaagcggtacttgtaatcccatcggcatcgtaatcgccgtagactgtaattttttcgccgcccatcacagccgcttggattcgatcgactgccgtttgcatatcatacaaagcgtatggatcatgtaattgaccgacattcggatgcataaacgcactgattgcctcaggtgttttgattcctcgttgccacaacaattgggctgcggctttcgggagtgcttcaactgccattattgcttgtaagtcttggtcagttggtgttgcttttaattgccattcatattgtgcttccacattaatccctcgctacttccaaatcattaacttacccattatagcaaagattattatatttcgtttaataatccaatcaatgcttttgtttatcagtccaaatgatatactgttaattgatacacaaggttattacatagggggaaacaaccatgacagttttagtattaggtggcgctggctacatcggctcgcacaccgttgatcaattaattcaacgcggcacggatgtcgccgttgtcgacagtctcgtcaccggccatcaagccgccattaatccacaagcgcgcttttataaacccgccataatatgtatttttctgttaatcctcaaagccaacccgttcgactacgcactctatagtatttccccgttgcttttaatgactttttggtaccagtagaaactgtcttttggatagcggtttagttctctttcttctgtttcgtcgcgatccacgtagacgaagccatagcgtttttgatagccgtttgtccaacttaataaatctgtgaagctccatgtcgtgtaaccgatgaccgaaacaccatcggtaatagcttcgtgaatggcttgaacgtgcgcctttaaaaaggcaatccggtagtcgtcgtgcacttgcccgccttctttcaaggtgtcataagcccctaaaccgttctcagtaattaagaccggcagtccataacggctctcaatacgtctgagtgcgattcgaagtccttcggggtcaatattccaatcccagtcagtttgttgcatataggggttatcagcggtcttgtagacgcctggcaacccacttgcttggctagtgccctttttaccggaagtattttgcttggtcaaaccaacgccaccttctagtgggttagtcgtaaccgtcatcgtctgatagtaattcaaccccataaaatcgggatgtgcgagtggatcggctaataaagcttggtccgcttcagtaatttcgggtgcaatcccgtttcgttcgagataagtcatcactaatttcggataacggccccaagcataaacgtccatccacaaatcagcgttaatttgttcggcattatcagccgcaatttgattttctgggtccgcattcagcgcataagttgggctgtaggcaaaactaggtccgatgcccccttgatagcctttttcatggaataatttaatcgcactagcattggcaaggtttgccatatgattagcttgataagttcgcttagcatcagtcactgctggcggatgctccgctgttaaatagccgtgagtgatgaagacattttgttcgttcaaggtaacccaatgttgcacacgatcgccgaagcgttcgaacaataagcctgcgtagttggtaaaatcttcaataatttgacgcgattcccaaccgccatattcggcttgcaacgcttgcggtaagtcccaatgataaattgtcacgattggttcaatatcattggcaattaatgtattaattaaacgatcataaaaggctaagcccgcctcattcacagcgcctttaccatttggtaagacccgtggccatgaaatcgaaaaacgataggctttgagcccagcgcgtgccattagcgccacgtcttcttcgaaacggtgatagtgatccaccgctacatcaccattcgtggctttgaacgttttgcctggaatgcggacaaattcatcccacacagaacggcccttaccatcttcttggtaggccccttcaatttgataggccgcagaagctgaaccccacaaaaaatctttaggaaatggtgctaattgatggtattccattactggtcatcctactttctctcaaagtcattgcttattgttctgcttgatatgctttttcgatttgtttcaacattttcttaaagccgcgtttacgcatgaaacccatgacaaaggccatcaacatatcattggtttgttgtaatttgccatttgctttggcattttcgcgatagatgacttcaatagactgcggtccattcgcgaaaatatcgtaacttgattgatagctcccccgggtagaagtcgtttcgtagtgatagctctgatctttaatcagttgcgtaatcttcagtgtcgcccgattcttgccaaattgcttgtcgtacgaataattaggcaactgcgcttcagttagtttatccccagtttgttgcttaatatcaaacaacactgattccagaatcttctgataaaaataactagctggcatttttaaatttaatttaatttccatcccgttcccactcttctcttcaatgtgccatttgttgcttttaactaaaaagagctcgaacaaaagtcattttgtcctagcccttttgttcattagccaaactttaatcgactggtacaccggccatcttcttgtaaacgtcaacgacttcgcctgctaaatcgcggaaagtaattgcgttcatcaagtgatcttgtgagtgaaccgtcaataatgtcacttgcatgtgatcgccacttgcttctttggttaacatatctgtttgtgaattatgggcttctgataaagcagcatccgcttctgcaagtttggcagctgctgtttcgaagtcacctttcttagcggccatgattgcttccattgagctactcttggcgttcccaccgttgataattaagcccatgattgcttctaagttctgttcttctgccatagtatggcacctcctatgatcatctcatcgtgaaccactttcgtaaccattcattaattggtctagatatttcttcgagaatgactaaccaatccattaaaaggctttcaaaaattagttcctgattgtgagagttcgccactatcgcattttacgaagcgaaagaaaacccttacttatattgtaatcgcttcctgagatttgtcaattaattactgataaccttttcacaaacggactagtccaaaaaaaagaaaccttaacaggttgttaaggtttctcgctcaatctggattagaccactagtcattatttttcttatggtagcccttattcttttgatttcgtttacgatttttcttatgttttggttttaatggtgcagctggctgttggcgaactggtactaatttggctttgcgcgcgcttgtcgtcggcgtagccttttgtacttgtccttctgttgcttcaccagtagttggtacagcagatgttgctttcgttgcagcaactggtgctactttaggcgtcactggtttttcggcttccaaatggtcaccgaccaaataacgggtcacaagatcatattcaggcgccaataacttacgcaaattccgcccatcgtgttgattgcccaacgtcaaaacagtccccgtgcgtcccatccgaccagtccgaccagcacgatgaatgtaagtgatttttgcgtttggtacatcaaaattaatcacataaggtaagtcggtgatatccaagccacggccagccacgtccgttgctagtaagagttgaatcttaccttcacggaaatctttgagcgctttttggcgttctgtttggcgaccttgccctgagagtgcggcatacgttactttttgatgttttaacgtttgtgcagcttgtaagagttgcgcggattggttaaaaatgaccaatcctctaaaattcttttgatgtgctaaatggcgtaagacgttcactttttgagcgttaccagttgggataaatgcatgcaacacttccccacccgtcttatcaatcccacgcacgtcgattgtttcgattggcacgccgaaccatgtttccaactctaataagatatcggttgatgtcgctgaaaagaagccaagttgcacatcggcaggtgattcttgcacgatatggcgggtttctgaaagcccgctatccgtcaataattcgtcagcttcgtccataataatcgcttggagtgtatggaatttcactttccgttgttcgctcaattctaataaccgaccagtcgttgccacgataatctctggtttggccttaagccgttcgatttggcgtttaacattcgccttccccgtaatcgcttggacattacagtcgattgccttggcataaggttgaatgacgtcccgtgtttggatcaccaattcctgtgaaggggccaaaattaagacttgtagcccttcgcccggcataattttttctaataacggcaatgaaaacgcgagggttttcccagaacccgtgggtgccagtcctagaattgattggtcttttttcagtggttgataaactgcctcttggatgggtgacatttctgtaaatccttgttcatcccatagtgcttgaaatagtggtgaaacgctcatgtattgcctccgtcatgttaatctgcatcaaatgttattccggccgactgtcttaattgatataaaacttggttgaccgattcacttagctgtaataattcatgataccgttttgtgtcacgattagcaatcatcgccgcgaaattttctgcctcagcaaccattggattagcaagtgattgttcccctagtgactcaatcttttgcccaccttcgctgtagcggtcaacactgccgattgtgccggcattatcgaggacaatcgtcgtttggccaccataaatttcagacgttagataggaatcaacggttttgccaaaaatcaacgtgacgttaaaggttggataacacagtgttgcgacccctttaccatccactccagttggtaacaattcagcttgataatcgactgaatcgggcacaccaaaccagctgacggcatcatagacgacatacacgccgagatcttgtaaagctcctccagaaaaatgtggtgagaaaatattcggttcttcacccgctaaaacagcgtcatagcgtgatgaatatttcatatagctcaaggtcgcgccattgatcgccggtaatgcgttgatggcttgttgtacaatcttaaagttggcctcatgaatatgacgtgctgcttcgaataagaattggtctggatgttgctttaataatgtttgcatggctgccatttcagccggattactgaaggcaggtttttccacgatgacatttttacccgctaaaattgcttgcttcgcttgttcaaagtgcagactattaggtgatgcaatgtagacggtttcaaattcattggcattcataaacccgtctaagtcagtgtaacttgtggcttctggtgcgtgatacttcgttttaaattggtcggctttatctgccgtccgtgaataaacagctgttaacttaaatgattcagattcctgggccgcatcaacaaattgtcccgtaatccagttagtcccaataatcccaagtgtttgcattataatcagctcccttatttaatactgccagtatacgggatttagatctaaaagcctatcgaaaagtttttctactgataagaattccgccactattcacttctttaaccattccttaaaaaaccagtcgtaagtccgataattaattgtccgcaaactaactatttcgtggtagaataatagtaagttggggtgtgacttatgcgattttttaaatttcaaaaaccacaagcaattttaaatcgaaccattcaccagtatcagcaaaaagttcggacgactcaagcgagtaaagtagcgactttttatgctggacactggtcttttaatgacaaccaaacccgaaaaaaacacacattagaaattacaccgaacttgttggtgcaaatcgatcataagccattgagtggtcaagtcatttccctcacggaaaacgaattggtctttctcgatcactacggctatcaattaaaaattacttgtgaaaatcaacggcccgtttcaatttacgatgaagccgaagatatggattatccaatcgaatagctattaaaaaaggcccataacgcttagcgttatgggcctttttagttattctttatttgttcaacattttttgagctttatctgggacttcgtttttggcaaccttttcccatgaaaccacacccttatttttattgacgattaatttgaggtacgcatttcgtttaagcggcgttgatttgttaccattaaaatcaacttttttggtaacaccatcttcattgtaggctgcttgttgatagttataatcgataaccgtttcccctgctgaatccttttcttccattcgtgttccgtttgaaacaatctgtgtatagtaggcttccccaccgtaataatagctatgaattccccaactaccaccgatgaaaaccaccacgattgcgattaataataaccagcctttgtgtttaatcattattttctctccgtttctatttaatagtctgccattgttgcttggtgccagtaaaaactgctaactgatagttcgtctgattatcactgtttggaatctgactagccattgtgtattgccagaacccgttcttagtcgccaatgttggctgttcccgcgtagtttgccacaatggatagtctcctttgtgtggcacataccgttttaataagctgggtgcaccaccaatgagacaattttgatgataatgttgattaatcaaggtcactagctgcgccagtgccatttgcgttttcttttgtgcgggcggttgttgtgcatagtcgttataataatccaaatagatcataattggtaaatcacccgtctggctgccaactgctttaaaaagttggtcagcttggcgttcaggcgaactatcaaaactaaaaaaatgaaagatgcccacgcgtaagccagtgccacttgctcgactgtaattggtgtcgaaattatcatccttgtaactggccccttcagttgcttttaaataaacaaactgaataccgtccttttttaacccgtcaaaatcttggtaaccatctgactgacttaattgcatccctagaatcggatattgcgtcgcgcttggtcgatccgaacggtgtttcaaccaccagatagcaccaccaagacacagagctaccgcgataatgccgataattatttgtcgccaatagcgcttttggaaactgtcttgaaaaatcggcgtcacttttcgtctcatccacggttcctccatttccagccttagtacgcttagtttactatcttcatgcattcgagacaagccacctaacaattttgttcgttactgtcacttagagttgccttttattggtaatcagatacaatgtgaacaaagggaggcggaatatgttagatgaacgcttagtggggttaacgtttactttacaggatgctaaatcaaccggcaccgttaatttttttggcatcttatatcattaccgtgtcgaaggaccagctagcgctggcttactcgtcatggtaacggccgtcacacctttagctttaatcgtgacagcgcaccacaatattctggcgtattaagccagacaaaagggagtttttattatgggtattttcatcagtattttagtcattcttgttttagttattgttgcagtcaccctcttttcatcatttgccttgattcataccggggaagttgggattttggaacgcttaggggtctacgttaaaacgcttgatcctggtttccatttggtcattccattcatttatcacatcacagaaatcgttaatatgaaacaaatccccttaaaagtcgctgaacaagaagtcattaccaaagacaacgtggttgttatgatttcggaaacgattaaatatcacatcactgacgtcaatgcgtacgtttataaaaataaagattccgttctaagtatggtccaagacacccgtgcacaattacgtgggattattgggaacatggacttgaacgatgttttaaatggcaccgaaaaaattaaccaaaccctttttgaacaacttagcgaagtaacagccggctacggcttaaacgttgatcgggtcaatatcgattcaattcaagtggcccacgacatccaagaatcaatgaataaattgctccgtgcttcgcgtgaaaaagaagccaacattatggaagccgaagggctcaaagccgccgcaattcgtaaagctgaaggattaaaagaagcgaatattctagaagccgaagccaataaacaaacacaaattttggaagctgaagggaaagctcaaagtgaacgaacaattgccgaagctgttaaagatcaaattaatttgatcaatgccagcttagtcaataacggcgaactctatcttcaatataagaatattgaagcgatggaacacatcgcagacggtcaaaataacaccattgtcttgccaaataagtcaatcgatagcttgggtaatttgccagcaattggtgctctggttcaaaaagaaagtaccaagcattctaattaatgaatgccaataaaaaaggccccagaataacaaccttactgttattctggggctttttttattggtcctctgaaggtgttgaatccttaggtgttggttgtgtattgcgggtgttctttttgctgagaatgtattgttctaacaaggccacaatctgttgattctgtggtagatcagagtgttgtgcttggtcacctgtcaccgtaatttcggtgtagtgcttgacttgcccttgataaatgtacttccccgcctctacactacgcgcgggtacaatcccatcattttcaaagttttccgttcccgcaattgaatacatcgataagttcgtcggaatatttttacgtttcttaatgaaatccgtcagcatctgtgacttatgcgtaatcgatgtttcggaaaagttatacggcgaaccaatcgtcatcaacttcttcactgtaatatcatcgcgattaaaataatcttctaaaaaagctgtataaattaagccgccattagaatggccaaccgctttaaagttattaaattgatacttcttagtcaacgcggtaaatgcgagcgaaaaccatttagcttgcttttgaatattactataaccgtccttattgttttcaaaaccaaccacgataaacggttcattatcccgcggtttaatttcccctgaatagctaatctgattattttcatgcacagttagttttaacaagctgtgccgattcccgcggttagcgttcaatttagccactaattcatcaaaccgattttgggttgcactactccctggaataaaaattaccggtgacattcgtgaatcatggcgcttagctaaggtcatcacgctctggcgactccattgagcagctggccacattaatccgccgatcaaggccaaactaatgactaacaaccagaggcttttttttcttaatttggccaatttatgccgcctcctttacgagtgctaattgatctgccaattggacaaacggcttgtagatcatcacgccgacgacaacgtttaataccgtcaccgccagcgcgactaaatcaccgttggtgcccatgaacgcttgcaataagccgggggtcccaagtggaaccgtgaagactaccgacggcatgagattcaatgcaactgctgccgatgcaatccccatgtttaccagtggtaccaataagaatggaatcacatacaagccatttccaatgacaggcattcccacaaggaccgcgctattaaagttaaataaaacgggcaacaacgaccatcgaccaatcaaatgataatccctttgtttgctgaagatgaaaacggcaatcactaaggctaatgtcccacccgtcccgccaatcgcaccaaagggttcatacaaagtccctaacgtgaacggatatggaacgtgccaagccgtgtgatgactaaacgcatagtttaagttggccgaagatgcgattccctcacgcccaaattgggccaatgttggcatactcgttaatccaaaaaaagttaagctagtggccgctaaaccagtccccaacgtgaaaagcagacccgtttgatttgcttttagtgattgtaatcgtaagatgacttgatctggcaagattgaaatcgccaaccaatttagcaggatactcagccctaaaatgacgccgagcaccaataaaatcgcccacatagaatccaatgaacgtcctaccgctgacccattcagcggtaaatcgcgccgatgaggtcgtcctaattttttgaaggctaatccagtcagatagccgactaataggccaaaaaataagccccccattcccaacatctggctgttgaaagataagccctcatttggcgtcaaccgtaacgctaagattaaataggcaataagccccgtaatgctggctaattgttcatcacgcttatagtgcttggctgtatagcgcgccgcacacatcgctgctaatgccgcaacgattcctaacgtcaaactcgtaatgctgtcaaacatcatctgaaagatattccgtttactcaaccaattcgaaagatgaaatacattcacaacaaaactattccggttaaaaagtgctagttggatgagttggctgatactcccaatcaagacaaatggaaataacaacattaaacttcgctgcataatctgatagaccgccgcggattggaatcgattaaaatgttgcgctaagcgcatcattatagattgttttttgacattcatgcgttaaccctctaaacatgttttgataatttcattctagccgaccttccgcttaaatgcacgtctgaacgcaaaaaacgggtcgctactttccatctctggataataacgacccgctaaaacgtgctttttgtggcaacttcttccgtctagctacgtctgtcaaatcaccaacttgttggttattcgccagcctaggctatactcagaagttaaccgccacaaacgcactctattttgaaacgtgctttttgtggcaacttcttccgtctagctacgtctgtcaaatcaccaacttgttggttattcgccagcctaggctatactcagaagttaaccgccacaaacgcactttattttaatactaatttagtgacactttcgacgtgtagcgtttgtgggaacatgtcgactggttgtgtgctttctgcttggtagccttgggctgccaatagttctaaatcacgcgccaatgttgctggattacagctgacatagaccatcttggctggttttaattgaccaacggcttcaatgaagctagtttccaaccctttacgtggtgggtcaacaatcaaagcatcgacttttaagtcatctgcttgccattgcgccatcacttcttcggctttaccgagtgtaaattcaacgttttcgatgccgttaatcttggcattgtgccgcgcatccataacagctgattcaacaacttcaacaccgtaaacttgcttagcatgtttagcgactgctaatgaaatcgtcccaatccctgaataagcatcaatgactgtttcgttccccgttaattcagcagcttcgatcgccttgttatacaagacttccgtttgcactgggttcacttggtagaatgattgcgctgaaatttcgaacttcaagcccattaattcatcacgaataaagtcgcggccagcgattaattttgtttcgtcaccaaagatgacgttcgtttgagcagcattgacgttttgcatgatgctgaccacttctggtaaagcttttttgatttcaacggcgatttcacgggcagccggtaatttcttactccgcgtgatgaagacaatcatcatttcgtggctgtaataaccgcggcgaaccataatggtcttcaaaacacccttatgcgtatcttcgttgtatggatcaatgtagaaacgacgcaagatatcacgaatgaccttgatagcttcatcaatcttaggatcttgaatgtagaagtcttccattggcatcacttgatgactgtgtttccggtagaaaccagttgttaaagcaccatcgataaaccgaacaggaacttgcgccttgttccggtaacctgttggatcatccatccctaaaacaggttgcactggaatatctaaatgggctttttggaagacgttcaagacttggttacgcttgaaatctaattgggctgggtatgccaagtgttgtaatggcgcaatcccagtttgtgagtaaatgttagcttttgattcaacgcggtctgggcttttcttcaataaattaactaagcgcgcaaaaccatattgtttattgacctttgtgacttggatttctgcttgttcatcgggcaaaacgccttcgataaacaacggatagttgtcgactttagcgacacccatgccttcataggttaaatccataatatcaaccgtcaatgtttcattttttcttacaggtgcttgtattttcatagttacctctttttaattgtgtaaaaagagtctgagacaaaactgagttttgcttcggactcttttcttagctacaagtgtgcggtcaatccgcccacgttatccaatgttccagtttaacctattttaccatcgccgtctatgtcttcttcagaaattgcttcgacttcctttacgaataaatcttcggcagactgctgagtaggggtttctgatgtaatagcgtgatctggaatatcttccttattcacatacatctcgatatgttgttgcaagttagtaaaggtcattggtgcatcgccaccgtattcgccatctaaattaatcatcatcttaacgtcatcatcaccaggacgcgcaactagttttgacgtcttggtataaatgacccgtggatcattaacgtgtttgccacctttaatgacgagtgcgattaaatggactaattcggccatgttggctgtcttaaccacaatcaatgagaaattaccatcattcagttgtgcatccggcgcaatctgttcaaatccaccaactgaattggttaaaccgagtaagaatagggaagcttccccatcatacgtaccttcatcatattccagatgcatcttaatcggtttaatttggggtaacatctcagcaccttttacgacatacgcgagatagccaaaaattgacttaaagtctgaggggacttcataggtcaattcggttagcaaaccaccaccagcaatgttcatgaagtaattgtcattggcttgaccgatatccatcttaagcgtttggttcttcaaaatcacgcgggctgcttcaaccggattatcacgcggaatcttcaaagcccgagcataatcgtttgttgtcccagcaggaatcacggccatcattgggcgtttttccaagccggcaatgccgttgacgacttcattaattgtcccatcaccgccagcggcaacgattaaatcgaagttcgcctttgctgctcttgtggcctctttttgcgctgaagcttcttcaggcgttgtttgaaaagcactcgcttcataacccgcttgttccaaaatatccagaatatcagcgacactacgtttcatcacttcatgtcctgaagttggattataaattaaccgtgcacgtttttgcattcgaatctcctaaaatatcaattatcgtttgttcaattcggccatcaacaagtcattgacaactttcggattagcttgaccccgtgtttccttcataatcttaccgactaagaacccaactgcgcggtctttaccgttcttgaaatcgtcaattgattgttggttgtcatctaaaatacctgtgatgattggtgtcaacttagcagggtctgataattggaccatgcctttagcttcaacccaggcttttggatccgtgtcattttggataatttcttggaagactttcttagcaatcttcgatgaaataatcccgtctttaatcaaattgatcatttgggctaagtgggcaggtgtgagggctgtctcttgaaggtcaatttgtttgtcgttcaagtaagcattcacttcacccatcaaccagttagaaacttgttttggtgcggcgccatcagcaacagctgcttcaaagaagtcagacatttccttggtgttcgtcaagacacccgcatcgtattcaggcaagcccaattcatccacatagcgtgcacgccgtttagccggcatttcaggcatattgtcttgaacttcttgtaaccaatcatcaccaatgtgtaatggtggtagatctggttctgggaaataacgatagtcatccgcaccggtcttaacccgcatgaggaatgtttcgcctgttttttcgtcaaaacgacgggtttcagggcgcactgtttcgccagcaatcaaaagttgtgattgacgcttgatttcataagctaaccccaaacggacgtgattaaaggagttcaagttcttcaattctgatttcacaccatattgcttcgcaccgattggtcgcacagaaatgttagtatctacccgcattgaaccttcttccatcttaacgtcagatgcgccagtaaattgaacaatttggcgtaacgtttcaaggtaagcataggcttcttcaggcgttgacatatcaggttttgaaacaatttcaatcaaggcagtcccttgacggtttaaatcgacatatgaatagccgtcagagccatgggtattcttcccggcatcttcttcaacgtgcaattcggcaatcccgatttgctttgtatggccatcgacttcgacttcgatatagccatctttaccaaggggttgttcgtattgtgtgatttggtaagcttttggattatctggatagaagtaattcttccggtcgaaatgcgtatcgcgcgcaatatcagcgtgcaaggcagtcgcaaccatcatcccaagtgtgtatgcccctttattcaaggttggcaatgtcccaggataaccccagtcaatcacattcgtgttagtattcggttctgcaccatagtttacaggagatggactgtacatttttgaattggtttttaattcaatatgcacttcaagtccgattgttgtttcgaaattcattaggcttttcctcctttgaagcttggaacgttcttgttaaattgagttgcttgttcaaaggcataacctgcgcgataaacagattcttcatcaaatgctttcccaataatttgtaaaccaactggcatgccatctactaagccggcaggcactgacattgctggtaagccagccatgttagcaggaattgttaagatatcgttcatatacattgtcactggatctgatactttgcgacccaagtcaaaagcggtggttggtgttgttggtccaaccactaagtcgtagtctgcgaaaactttttcaaagtcgcgcacgattaatgtccgcacttgaccagccttcttgaagtaagcatcgtaaaagcctgatgaaagggcaaacgtccctaacataatccgccgtttcacttcatcaccgaaaccttcagaacgtgatttaacatacacatcttcaagtgtcttggcttcaggtgaacgataaccataacgaatcccgtcaaaacgtgacaagttagatgaagcttcacttgaagccataatgtagtaagtttggacggcatacttagaatttggcaagctgacttcgtcaacggttgcccctaatgatttcaaagtttcaatggctgtttcgatttgggctttaacgcctggttcgacaccttctgccatgtattctttggcaacagcaatcttcatacctttgatgtcaccatttaaagcggcacggaaatcaggcactgggatatcagcactcgtactatctttttcatcatgaccactgatggcttgtaaaacagtcgcattatcagcaactgtccgactaaagaccccaacttgatcaagacttgaagcaaaagcgatcgcaccccagcgtgacacacggccgtatgttggtttgatgccgacaatcccattaaatgcagctggttggcgaattgagccacccgtatctgtccctaaagaagcaacgacttcaccggccgcaactgctgctgcagaaccacctgatgaaccaccaggtactttgtctaagttccaagggttctttgtcttcttgaaggctgatgtttctgttgatgaacccattgcgaattcatccatgttgtttttaccgatcacaattgcatctttagcttttaatttttcaacaaccgttgcatcaaaaaccggcgtgaaattttcaagcatcttgctggcagcagtagttgttaagccatctgttaataagttatctttaatcccgattggcatcccagctaataagttatctgcatcaattggttgggcgtccactttggcagccgcagcttgtgcaccagcttcatcgattgctaaaaaagcatcaacttgtggttctctcttgtcaatttcagcaactgtttcagttaccaattggctagcagttaagtcaccagccactaatttggcatggatactttgtaaatcttcatataagtagttcacggctagtcttcctccttatccataatggcagggactttcaataagccgtccgctgaatctggtgcattcttcattaaaatctcgcgatctgtgccagcttgagccacatcttcgcggacaatattttgaaggttattcacgtgggtcgtcactgggacacccgttgtatcaactttatttaattcatcagtcattttcatgatgtctgcaagttgttcagtaaattgttctaactcagcatcgctaaaagctagttttgaaagttctgcgacatgctgaacttgtgttttatcaatcatgagtaaacccctcttctaattctgtcacttttatccattctgattaattttaccatatattaacgtataagaaagtgacatcccttgaaatttaccagtttttcctaatctttaccggtttcagcagatattgaaatatatttttactttctttttaaaagcgtaattgaatgttatgcaattcattagaaggcgatatgatttataagagtttataatataaacgcattcgtttaatcttatatactgaatacagataagaagttgtgaataatgtacaagactatcattaacttatagatgagtgttataatatgaaaatcaatatctcggaacaccttgtagcagtagtagttttaagtttaatgggtggcattgtcttacaaagtacgaccgtttcagcagcgaccacttcggttggtgtaactatcactggtgtaacacctggaatggccgctaaagccaaagaagcagccgcagaacaagccgctttagaagaagcatggttacaaacagaaatcgatgacagcgaacctgtagaagttaccgaaacaattggcggtcaaacaactcactactgggaatcagcagatggctcacgaagcacaactgcccccgcagaagttcaagacgaaacagtagccgcaccggaagtagcacctgaacaatttgaagaaacagcagttgaagaagaccaaccagccgaaaacttcaaaccaatgcctaagaaacatgacatcgatcaaaaagcaattgctttcaaacaactcacaacagattgggctagcaatcaaatcatgtcatcattggaagacttaatcactaaggctttccaacttaacaaataacactcagtattagctaagcggcaagtatcgtaaccaagcgtccccagttttgagtagtttcaaaagcaacactcaatagtctgtcggtgtaacttacggatttacccatactagaagttactaaactatttagaattgtttttttcctattttaaacgtttataaccactccactgctaaaataatttcattaaagtttgatgagttcacccaaaattttgggtgaatttttttattgcttaatgatttttcaaaaataagtctaattttaatagacatttcacaacttatttcatgctcataaaagaacccaaacctactgatagaagcaacttaattgattatcgggctgtattatcggtatccagtctgaactcccttcatgtaattttcatttacggcagactctggctagcctgattacagcagaacacctcaataggtgttatactcttaataacatctttttaaaaggagtctatcatgaaaaaatcagtccgtttaagcaatgccgtccacctgatgaccctgattgctttaaacccgtttgataacctttctagtcagcgcattgctaaaagcatcaatactaacccctcttttattcgccaaatcatggggcaacttaagacagctggcctattgacgagcgttaagggccatgccgaacccaaactaacgaaagctcctgaccaaatttcgctctgtgatatctataaagccgtcgatgatacccggttattgaacatcgatacccaaattgatcctagttgcggccccggacaaaatattcaattatcgcttgctacctattacgatcaaatccaagaaactgctgaacagcaaatgcaagccatcaaactagccgacattatcgaacaatatcaacaacgtctcgttgaaaatccagaattaaaactttacgaaaactaacacacaaaaaggttgggtaaattgcccaacctttttgtgtgttaatcctcagcggatacccggctgatgccgcactcttttcttttaaacgtgctctatcagccaaccgcttccggttaaccctgaatggcaaacaatcgctaacccggttattcaccattctgtgttaatcctcagcggatatccggctgatgccgcactcttttagatttgctagtacctttactaagtcatacttaactgcaataccgcggtccattaattcacgtggcacaatcgcatctttgggattaacggtgatatatgttgcttgtggattttggtacgttagattcataaacggttccttaataaacatcggtgtcatcatacccacacctagttctaaatagaccgtttttttaccttcagctttttgaataaattgacgatactttgcgtattgattgttgtagtgctgaccttcaaggaattcataaccacggacccattccaacatttcagcaccacatttagggcaccgcggaattaagttttcgggtaaatggccattttcaatttgcggaaataattggtcaacaactgtctgattaggatagacttgatcatgacatttatcggcacattgaaaataggaccagtcaccctgaatcgtggcgacatctttatctggaaaagctttcgagaattgcacgtcttgattcgtcgttatcaaatcatagtctttaccctttaaaatggctttcaagtcctgatacggttggtaaactggttcatgtaaaacaaaatgaattaaagacagcttaaagccccataaatcgccgggattataccaatcgggaccagccgcagccgacatgccggctgcggctcccacgatgacgtaatctgcctctttgagcgtcgttgccattttttgtagtgttgcttgatagtctaaattagtcatttttgaggagctccttaaaattatcatcgattgatccagcaagaccgattgaccgttgttcaatggctgcgggaatattgatttcgtgcggtaaattcaacgtgatgtaacggtaacttagactttgcgccaccaattgcatgaggagcgccttaattaactgattattagcaccaattcctaattccagaatcaccacgttttgtgaacgatacttttgaacaaatgcgttaaacttagcttgttgcttttgaatcatcggcattggattttgattgttaccaaaattaccttccacttcaaaaatccgttcttcgtcaaatccactcagttgaaaatgcatgttgccatttgatgtgacaacaaagtattcatgaccgcccaccaactgctttaaatcgcgaaagacaggtgtactttcatagtgatcaaccatataatcgaacaatactttgtaaaatgcatctctttcagccactgttggatagttgtaaaaagccccttgaagaatattcataatcccgtagcgttcataaaaagtcccaaagtgggtcataaacgcttcgtcgtgtgcaaaaatattgtaaccttccgtaattgatagcccattaccagcactaataatgacggcatccgcattgtctagccaattccgtgctgttttaaactcgttcatgctgctctcctttggtgtaataaataaaataacaacaatatcgcatattgtacactgttatttttaaaattacaaccactgacttttaaaggtccaaaaaaatagcgtcgacaactgcgttagttgtcgacgctatttttttgcctatcagtcataactgactgttgtcgcactctttaattaataactcccgaatacgtgggttgagaaccttttactgccggctgctcggcctacgtaagcttgcatcccctctgcagacgagattgaaatatctaatggaatattttgtggtaaatatttatcagcagcggttgcaatgtattgtgtgaaactcatgatttctgtttcactgtagaattgtgtattaacggtgatgttcatcccagccaatacaccatcttcatagtgtgcttgagccgtgacaccactcaagttcgggaagaaggtttggacttgttctttaaaactagtaaacgcgtccgcatcactttgattgaccgctttttcatcattaacgagtgggaaaacttggttggcttggttcattttgtgccatgaatcaatcgttgtactaccgtttttgctgaccccataagcgaagaaggttccgcccactaaactatccttaggtgcttgtttgtaaagccccaccacgatggttgtcttactcaaaccttttttctgccgtaaacgcgttaagaccttattggccatttgtttaccttgttgcgccatcatggcactagaaattttggtttcaaaagtagcaccatattgttccttggtatagtaatccacttgattcatcccaagaccaatactcatcccttcaagcgcaccatctgcccctaagaagtcttgttctaagatttgttggagatacagtggattccgcttatccggttctttttcaccattatcttctggatttaagccaagtgtattatcttttgattgacgtgccaaccatttttgcgcttccgccgttttgatggtttgaccttcttggtagaggtatttatcagtagggaattgttttttagaaatgtttaataagccactttccaaactcttcacatcaaatgccgtgttactttgttgtgtggttaatccacgtgtctgacttgtcttgtattggttattatcaataaccccttcatacatgctgtcagtcactttcccggtcgtttgtagctttttagtcgacttagttgatgatgacgaactcgaattgctttgtaaacttgtacaacctgccaacaataaaaccgttgcggctgcaactacccataatttatactttgccactgaaaatggcctccttataagtcctaattgattcgcttattgcgccaaataactatctaggtctgcttcgttgataattggaatctccaatgcttgcgccttggttaatttactgccggcatcttctccagcaatcaaaatatctgtttttttcgaaactgagccggtcactttagcgccgttatcttcaagttgttgtttcaactcaccgcgggtatattgcgatagtttaccggtcaagacaaccgtttttccgttaaagtaactatcactattttcagcttgtgcctttgtcaccccagtataggtcaggttgacttgcacttcagccaattcacgaattaaagtttgtacttgatcatcagcaaaataagtcgctaagctatccgcaatcgtctcgccaatcgtatcaaccgacataatttcttcttgatcactggccatcaaagcctccatcgtcaagaaatgttccgctaataaacgggctgctttggcaccaacatggcgaatccctaatccaaataataacctttctagcgaattctggcgactagcttcaattgcatttaacaaattattaatagatttttctttaaacttatccagttgcgcaagttgatcggccgttaagcggtataaatcggcaacatcatggaccaatccttgatccaataattgggcaataatccgtggacctaagccgtcaatattcatcgcatttctggaagcaaaatgcgttaactgttccttcacttgtgccggacacattgggttaatacaccgcaatgcaacttcttcatccaaatgaaccaattcatgaccacacgaaggacattctgtcggaatcacatacggttgactgtcagccggccgtttagccagtactacttgtgaaatttctggaatgatgtcgcccgctttgtgtaataaaaccgtgtccaacaaacggacatctttatcacgtaacatatcagcgttatgcaatgaggcgcgcgcgactgttgtaccagccaactggacaggatccatcacagcggttggcgtgacaacccctgtccgaccaattgtccattcgatgtcacgaacaatggttgccgcttcttcaggcgggaatttataagcaatctcccaccgtggcactttaaccgtattaccgagttggcgttgtaaagctaagtcgttaacttttaacacaaccccatcgatgccgtattctaagtcatcccgcgttgcttgatagcgctcgataaaggtctttatctctgtcatattatgacaaacttcagcggttggattgacgttaaagccgagttctgcaagcacttcaagcgcttcgtgctgggttgtcgcttgcacatcgtcaaaggtgacaatcgtgtacataaaggcactcaaattccgctcagccgctattttggcatctaattgccgtaaactaccagcagccgcattccgcgggtttgcaaatggcggttggccttctgcttcccgtttttcatttaatgccgcaaaagaggctttgggcatgtaacattcaccacggacctcaatagagactggcttggttaatgtttgcggaatcgccttgatggtcttaagattctgggtaatgtcctccccaatcgtcccattgcctcgcgtcgcaccacggacaaattgccctttttcatagatcaagtcaatcgcgagtccatcaatttttaattcgacattatattcgatggcatgctcaacgtttttttgaagtcgattatcaaaagtcgcgagttcttcctcagaaaaaacatcgcccattgataacatcggtacttcatgcgtcactttcttaaagccaggcagaacttgatcaccgactttttgagtgggcgagtcattagtaacaatgattggaaaggccgcttctaacgtttctaagtcgcgatacaattcatcgtacacgtgatcttcaaccactggggcgtcctttgtgtaataggcttcgctgtattcagctaatgtctggcggagttcttgggccgccgctgccgcttcagtttgcgtatattgatcgattggtttagctaatcccataatgaagactcctcactgtttatgatttgaaacgtgctttttaaagctgactcttgtgcttagcttcgtattgcaaacgaccgactttgtcggtcattcacaacactgtgctaatgctcagagtcaaatccgctttaaacacactctgttttgaaacgtgctttttggttgcaacaacttccgcttagcgctactcgtcaaacaactgcttgcagcagttattcgccgagttgtgctaatcctcagaagataatcgtcggaaacgcactctattctactttttcaattggtgcgaagcttgctagtagtcttttaacgccttgttctttgaaggcgatatctagttcttggtcgttgccggtcccgttgaccttgacaactgtgccaatgccccacttcttgtgttggactttttggccggctgtccaagcaccactgttatcgccgccagttgtgtcggcaatcttgtgactcgtcgttgttttatttgcattatacgttgtagccgttgcgcgtgcataacgattgctcttaccaaatggcacattgcgttctggaatactgccagcattgccatttgcgtaatccaataatttatcatcgatttcgccgacaaatcgggacgcttggttactttgttgacggccgtataacatccgtgaataagcgttggttaagtacaatttgctttcagcacgggtaatcccaacatatgccaaacggcgttcttcttccagttcgtcttcttctaataaagcacgtgatagtgggaagatgccttcttccatccccatcaagaaaacaactgggaattcaagtcctttagcagcatgcaaggtcatcatggtcacttcactggcttcttcttcgactgaatctaaatcagagaccaatgataattcggccaagaagtccacaaataaatcactgtcatcttcttctggttcataatgttcgtcgaattgtttggtaactgagagtaattcttcaatattttctaaacgactttgcgcttcgagggtgttttcaacttcgagcgcttttttgtagccagtcttatccaataattgttccgttaattccgtcacgtttaaaaattcgcgcatcttcgctaagtcaccaatgacgttgccaaaatcgatcaacgtcttgcgactcttacctggaatggttgagagttccgcattttgcgctgcttcaagtaatgaccattgatgatcatccgcgaattgcgttaatttttcgagagtgccggggccaattccccgtttcggactgttaacaacccgttcaaaactcattgaatcagacgcattcacgactaggcgtaagtaagccaagatatccttgatttctttacgatcgtagaacttatgcccgccgaccatcttgtatggcatgttggctttgacaaacgcttcttcaattgaccgtgattgggcatttgtccggtataaaacggcaaagtcgccgaatttacgttggttcttttgcatttcttcttggatcttcgtaatgacaaagagtgcttcgtcacgttcactttgaccccgataataagtaattggttggccttcgttattttcagtccacaattccttaggtttacgatattgattattgttaatcacaccgttggctgcttctagaatcgttttggttgaacggtaattttgttccaacatcactgatttagcatctggataatcatgttcgaagttcatgatgttgtccatgttagcgccccgccaaccataaatactctgatcggcatccccaacaacacagagattcttgtatttctcagctaacatgttaaccaatgtgtattgcgcttcattggtatcttggtattcatcaacgtggatgtattggaatttttcttgatagtgttcaagcgttggtttgttttctttaaataagcggatcgtttgcatgattaaatcatcgaaatcgagcgcttgattttgttggagtcgtttttgatattcggtgtagcattgggccacaattttttcgaatggtccgtttgctagacccgcatagtcgcttggtgtttggagttcatttttggcgttactaatcgtgcctaaaatcgcctttggttcaaacttcttcgtgtcgatgtttaaatcccgacaaacatggcgcattaacgtcaattgttcagaaggatccgcgattgtaaacgcgcgattgtagccaatttgttcaatctcccgacgtaaaatccgcacacaaagggcatggaaggtagatacccaaacatcttgagccccttcgccgagtaagttaccgacccgttcacgcatttcacgcgccgctttattcgtaaacgtaatcgccagcacgcgccatggtaaaacgtgcttttcttcaattaaataagcgacccgatgcgttaacacccgggtcttcccactaccagcacccgccatgattaaaagtgggccttctgttgtgaggaccgcttcagcttgcttatcgttcatcccttgtaacaattctttttcagacaaattagtcatccttccgtaaatgcaatcagcctatattataccaaactagataggtagaaaaaagcgaacacgacctagtaaaacggattctaatttttcgcaatcttctgccttgacctgggacgcgtttcataaattatactcaccttaatccaagaaaggtggtatgcatcatgattaaatacattttttctaacttagatggtacattgttaaaccaagacggacagctttctgaaaaagatattgcggctgtcaaagcaagcccactcccaatttccttgatttctgcgcgttcaccacaagaaatgcaagctacgattgatcagttagcgttaacgacaccccaagtcgcttttaacggggggttaatttatcaaccgacagatcttttcccaatggttttagcagaatatccacttgcaacctctgctgtcgcaacattaattgccgcattacaatctgaatttagtgacatcagtttaagtgcgtatgacttacaccactggtacacgcagacaattgacgctggtattgaggcaatcgctaagcaaaccggtcaattgccgacgctcatcaattttagtgatcaattgcaaaatccatttctcaagcttttcaaaattcaactgattatgcaaacgacacaacaacgggcaactgttgctgatttcatcaaccaatgccacttgcctggtctttcagtacaacaatcaggtacaatgaccttagaaattacgagtcatgaagccactaaagctaacgcattaaccaccatcttagaaaacactggactaacagtcgctgattgcgccgcgtttggtgaaggtcaaaacgacttagccatgttatcgctagttggccaccccatcgtcatgggcaatgccagtgatcaaatccagatggcgggtcaattcattacgaagactaatcatcacagtggcttcagctatggtctaaagaaatacattactaaagttaatcaaaaagtaggttaggattatgccaacaattcgtgatattgcccgcaaaagcggctattcggtttcgaccgtctcccgtgtgttaaatcatcaaaaatacgtctctgaacctgccaaaacggcaatcgaagcggtcattaaacaactcgattacgtgcctaatagcttagcgcgcgatttaagcttcggtcaaaataaaaatattggggtcgtcctaccgcacaatgaccatccgtatttcaaccaactcttaaacgggattatggatgccgcgttttcaagcggctatcacgttgtgctcctaccttccgaatataatcaagcagtcgaactagattatctcgaacaattaaaacgtaagaattttaccgcactcatttttacttcacatggtattgcactctcagtcttagcagagtacacgcgttatggtcaaattgtctgttgtgaagacccggggacccatcatatctcggccgtttattctcaccgtgagcccgcctatttagcggcattcaagtaccttaaagcccacaaagcacagcaaattggtctactattaagtcgtaatttagcgcaaagcccgacctggattgccgtcacgaacgcttatcaacaagttttcaactgccaacctgattccgagttaatggtcggtggcatgcgctcatttgaagatggctatcgcgccgctgaacaactggttgaaaaacagccaaccctcgcttgctattttacaaatggcgacgacattgccgctggtgtccgccaatatcatctggatcatcaactgccgaccccgcttttaattggtcaagaaaaacaattatccagttttttattgcaactgccaacaattgaccatcacttcttcaccctagggcaaaaagcgtttgaagtcgccctcagtaaccatcaccaagtttgtcgtttcgaatcagaatttattttgccataaaaaaagccactttaacctaacttttaggctaaggtggctttttatgtcggatgcttatgcaaacacccgatcaaaaattgtttgaacttgttttaagtgccattggtaatcaaaggcgtcgtctaaatcggcttttgaaagttcactcgtcactttcggatcggcttctaataattggcggaaatctttttgttcatcccatgctaaggctgtcttcggttggaccaaatcataggctgcttcacggctcagacccgcatccactaacttcaacaagacacgttggctgtaaattaaaccatgggtgatgttcatgtcagccttcatcttttcagggaagaccgtcaacgtcttcacaatccgcgtgaagcgattcaagatgtagtccaataaaatcgtagtatcgggtaaaataatccgttcagctgagctatgtgagatatcgcgttcgtgccataatgacacatcttccatcccggtaatcacatgaccgcgaatcacacgggctaagccactaacgttttcagaactaattggattgcgtttatgcggcatcgctgatgaacctttttgacctttagcaaagaattcttccacttcgcggacttctgttcgttgtaaatgccggatttcagtcgcaaaatgttcgattgaggtcgccacgaccgccatcgtgttaatgtaatcagcatgtagatctcgtgggagcacttgcgttgaaatatcttgggcccggatccctaagtgttctgtcacataggcttcaatttcaggcggaatattggcgaaagtcccaactgcaccactgattttaccggcttcaacgccttttgctgcgcgttcaaaacggtcttgattgcgtttcatttcagcataccaggttgctagttttaacccaaacgtcgttggttcagcatgcacgccatgcgtccgcccaatcatcacggtattttggtattcgtaagctttatcttttagaacggccataaaattggcgatatcagcccggattaaatcgttcgcttgtttcaaaatatacccttgtgctgtatcaacaacgtccgttgaagttagaccatagtggacccactttttttcatccgctaaggattctgaaacggcacgggtgaatgcgaccacatcatggtgtgtgatggcttctaagcgattgacttctgccaaatcaaagctagcattcgcgcgaattttctgcgcatcctctgtgggaatatcgcctaattttgcccacgcttcgacagctagaatttcaacttccaaccaagcttgataccgattttccgttgtccaaatggcgcccatttcgggacgtgtataacgttctaacataaacttctcctccaaatactacctaaatgctggtgatggtaaaacgtgctttttgtggcatctttctgtgcttaaccaaatttgccaaattcgcgattgcatcaccaactcgtcaaatccagttaatgctcaaaagataaccgccacaaatgcactctgttttgaaacgtgctccatcgggcatctttctgcggctagctacgtccgtccaacgatcgactgcgttgctcattcgccggcctatgctagtcctcaaaagataaccgcccgctgtcgcactctaatataagtctgccgcttcgtaattatcgattaagggttggatggcttgtccggttgctgtgaccgatccaatctgttgattggtcgtgacgttgtgcaaattaaagtaccaatccggtttgatcttcatctgtgtttgaattaatgaccgttgtgcttcttgaatccctaaggtcatccccgcattattgaggcgtgatgggccgactgccaactgacagatggccttcaaatgatattcatattgcgagaaattcaaggtatgtgtcaagacatcgcccgttgcgtgcggtgttggcataattcgtttcacataaatattcatagcgggtgttaaaaagaattcaaccccaaaaacacctgtatagtctaatttttccccaattaagtgggctaatcgattaatttcagtcgcaacatcttgattaatccgtgctggcacaagcgacattttcaagcgatgatcttcaaactcattttcgatgactggcagtgtcacacacttaccatcttcagttttaacgaccatcactgatagttcttgtgcgtcgggaatccaagattccaaaatataagtccccaactcaagggcagcttcaatgttttcaaggtcactcggttgttgaataaaacgttgatactgcttaccgtaacctttttgaatgggttttaagatacatggatatccgattgaatcgattgcatcttgaatatcatctacatcaacaactgtcgcatagggcggaatattgatatttaaatcactcaaaaagactttttcgaggtaccgatcttgcgtcacagacaacacattactgccttgaggtagataataatgttgtgccagttgttcgagcaccgtctcatctaataattcattcgtataggtcaacacttgactgacttcaccgagttggactaatgtttgataatcattgaattcaccatcgatctgactatcaattaaacgtgcaaatgaggtattttgcatctgcggggtcacaatcgcggctacccgataccccatttcttttgctttgagcgccaacatataggcccgttgatcatttccaataattccgatggtttgtcctggataaataactggcatcatattacctgctttcctgttcaccaaactgtatacccttattatagcgaatttaagcgttgtctgcctaatactttcctccatgataacaaatttttagacaaaaaaagagtgcctctcagcactccgttaaataacatttatttattttcgtctaaaaagacgacttgaccgtcttcaaacgctgcaattcgtgctaaagattccacttgaatgccgcgttgatctaacaattcgcgacctttttggaaagtcttttcgatgacaatcccgacaccttcaagttgtgcgccggcttcttcaataatagaaagtaagccttcaaccgcttgcccgttggctaagaaatcatcaatcactaaaacgcgatcgtctgcattcagaaacttcttcgaaattgaaatgtggttattcactttcttcgtgtatgaataaaccgttgcgctatacatgttatcttgtaacgttaaactcttgtgctttcttgcaaaaacaatgggaacgtggaatgctaagcccgcgaaaacagcgggcgcaatgccagatgattcaaccgttaggattttagtaatcttcttatccttaaataagcgttggaattcttcacccattgcagccattaaatctggatccacttggtgatttaagaagttatcgaccttcaatacgtcttgacctaatacttgaccatcttttttaatgcgttcctctaatagtcgcacgctgagctctcctttgtagcatcgttaaacatcactaccgatagtagtaacgactaataatgttttctgaaattgaattaaaaatagattaccacaaaaaaagcaacacaacaagctcaaatccagttattcagcgatttgaaaagagcctgtcacaaaccggaatttgtggcaatctcttttgagattaattagtagcagatttcccatgatttgtttcatagcattctttattgatcatattggtcgaggtggtaagccttaacgagctcaattaacttcgctggataatcagggtcagtcgcatagccgtcttgttgtaatgcatgggcagcctgctcataattagtggccgcgattacgtgtgcatactgcgtccggttccaagaggtcccataagcaaacaattgtacatggtcaagcatcgattcttgataattgttatatactctaaaacgcgctgttgtcgttacccactgaccatttaaatattccttggtcgtcatttccttggtgttggcctcattatcacccttaataccgaaataattatggtattgcgcagcaagtgagctcttcccccaatcactttctaaaatggcttgcgctaaagtaatacttggtaaaacatgatatttcgtctgtaattcttgggcatatggcaccatttttttaataaacgcttgcttcttagcttggcgcgattgttgttcctgtctggcttgatcggcaagttcttcttgggccttttgtccattataccgaactaataaaacgagcccaattccgagaataaatagactcactaaaacgaccactagccaatcggttgggtggcgtctcttcttagaatagtagttagctgttggtttgcgttttgtcgtcttgcgtttacgtttttttgccaatcctctgcctcaactttatctgaatctattctatattgtacacaaattcattcagaacaccaatctttaatttgtaacccccctttaatttctatttagcgcttttattgctataatattggctgtaaccgattacgatagtaaaggactgattttattgacaacgcttaactggggaattatcggcttaggcaatatcgccaatagtttcgcaacttattttaaccaacctgatggtcacatttatggggctgcttctcgttcactcgataaggcacaagcctttgccgaccaatacaatattccacatgcattcggtagttatgccgacatgctcggtgatgacaacatcgacatcgtctacattgcaaccccccacaattatcacttcgaaagcattatggcgagtcttgaagccggtaaacacgtcttctgtgaaaaagcgattacgatgaaccgccgcgaactcaatgcagcaaaggctcttgctaacgaaaagcacttgatattagctgaagcaatgaccatttatcacatgccattgtttgctgagattgaacgccaacaagtcgctaatcacttgggcgctttaaaatcaattcaagtctcttttggaagttataaagagcttgatccaaacaatcgcttcttcagtcccgcacttgccggcggtgcaatgcttgatattggtgtttatgccctctcatttgcacgtcggatgttaactgctaaaccagaacttgtagcgacgcaatgggtgccatcagaatccggtgttgatcagcaatcaacattacttttaaataatgccaagcatgaaatggtgactgttaccttaaacattcatgcgaagatgcctaaacaaggtgttctcgtttatgaaaatggctatgtcaccgttgacgattatccacggcctgacaaagccaccctcactttcccagatggtcgcgttgagaccattcaagcgggtgacgcaaccaacgcaatgaactatgaactccatgatttccaagaaacagtgcgcggaaatcaatcaaacgataccctcgaattatcaagcgatgtcatggacatcatgtcagacgcacgtgctgaatggggctttgtctatccatttgaaaaacgcactgatctcgattaatccattcaaaaaacctggccaatttggtcaggtttttttagagtattttagtgagaaccaccatatcttttaggcgaatcccattttcatagattggcgtttgatattggtcgaagaagtttttgcgaattcgttcgaaccgaaagccttgacgcaaataaaaaccaatcgctgccaaactaccgtccccagtgccaactagcaatgattgaaacccttggtcaattgcaatcgtctgaatttgagtcatcatttgcccaccgaatcctcgatgttgccattctggccgtaccgcaatatttttaagttctacctgctgatcgttgagtgccatcagatggaaggccccgatgacttgctgctgatcgcttaaggtgtaaaattgcccatgcatcaaatagcgttcaatcatgccgacttcttcatccgctaacaatagatcatccagccactgtcgccgtgctgcgccctcaatcaattgatacgttaacatctccagctcaccacccaatcaaaaaaaggggtcgcgacaaaattgcttttgccgcgacccctgggttaatttttaaattagtttttgtttacgttaacagcttgtgggccgcggtcgctttcttcgatatcgaaagaaacgctttgaccttcttcaagagtcttgtagccttcaccttggatagctgagaaatgtacgaatacatcactaccatcttcgcgagttacaaagccgtaacctttttctgcgttaaaccattttacagttccgttttccatgagaaaaatcctccttgtgtcgatgacacattataaatttgtgtatttctggtggtccgatggaagaaagttcttttggaaacattcgtaccgcaaccattcaaaaagtacaaacatagtgtaacacaggcaacaaccattggcaaccatttggcaataaaaataaaccgttttctatcacggacaatcagcatccgtgtttttagacaagtgttattttatatgttgaatcatgccccaaatgatttggctttttgctttaattacgttaagatagcagtataactttttctcattggagtgcttgcttatgctaaaactattgaaacggctattaccaattatcttcatcggggtgagcctagccgcttgccaaaaaccgatggatactaaacatcaactccaagccgatatgcaaaccgttgaagatgcgactaagcaacaacgaacagctctttcaaccctcgaaacaatcggcgatccagttcctgataactatctcacgattcaaaaaaaatatcccgacgaaaatctattaacgattgaagatactaagattgcgacgactgcggccaagcgcgaagcagcctttcaaagtcttaaagaacaacaagctgtgctcaaaccggtcattaaacgcctcaccaaactggtcaagcaagaaaacgatgaattgccgattgaacaagtcaaagatttaaatcaaagtcttaagatttcgacacttgattatacaaccttggccaccttctacaacgcggccactaaagcatctgatgaattttacagcgaccatacagatgctgatgcagacgaagacagtcttaaatcaccaatcaatcgtttaaatcaatattacagttcagtttatcaacaagccgaaattgctaaggtcaacatgaacacagttgctgcgcatgctaagaaagtgcaaaaacaactggaataaacaaaaaaggagttggacaaagtcacgtttgtccaactccttttttcaatctttaattattcaacccgtggcggaccacaatcgtcggctgtagctacccgcacttgttattgcgtccgtttaaaccgcatgagtggtgttgcgactagtggtgtcaccacagctgctaaggttgcttccattacagcatttaacgcaacaacgccaagcatcacgatgattaaatgggtcggatcagtatgatacatccctgccgcttggtgtccgtaaagcacacgcgttaagccaatcactaaaatggtattgattaaagccccgaaaatcccagctaaagccattgcaccggttttacgaattttagtttgatataagtgttggaacgtaaagccagcaatcatcccagccatcaaccgcggtaaaatagcgataattggattttgaaagattaaaagtgaaagcggatcgcctggagaggtataggctctaaataatgaaatcaaaccccaaattaatcctagaatcgccccttggcgtgtgcccaggatcacggccccaataatgaccgttaaatgaattgttgttacggctggtagcccaggaatgatattaatataaccgaccatcggaataaaactttgaatgattaaaaaagcggttaaaatcgccataatactaatcgtataagctgatgaatttttatgtgtcatcctaactgactcctaaactgaatttattgctcattatagcgatttgtcaccctagtttcaatcatttacatcaagggacaaaaaaaggtaattccaattggaattacctaactgaattatgatgcgggtgagaagactcgaacttccaccgggaaaattcccgacaagatccttaatcttgcgcgtctgccattccgccacacccgcgtaacttgctttatcactttaagccacgtacattagtataagagaaacgatgattgaagtcaattaaaattttactttggagacgattacatgcccattatccccgctaaactaaccgatattgccaaattaaccaccctgtatcaacaattaacgactgaaatgcatgtgctacaacccactaattaccaagctgattacacgcctgagttctttgactggcaacaaatgataactgatccactacaagcagtctttgttcatcaaaaccaagatgcgcaaatcgatgccttttgtcacgttacaacagcccaaacaagtccctcacccttgtttatcgcacaccgctttgcttatctcacaacactgtatgttgcaccagaggcacgccgccaccacgtcgctacacaactgctatcgtccgcaaagcaatggcaacaaacacaagcgctcgattatttagaactaaccgtgttagggaataatccggctgcgttggccctctatcagaagctgggctacaccactcagaatcaaactttacgcgccaactaaaaaaaggccacccctaaacataggggtggccttttttcattgaatttgtgtggtttgataaatcagtcgtccatgacaccgccgacaaacatagcgagccgtattcattcgacggcgacgtggatagacttgcccacagtctgaacatttataaatcacaattttgctcgatttagctgtcttttgtgcagctggtgcatagcgcgcacccccgacttgtgcaagtaattgtttaaactctgcgtctcgatgacggtaaccgcgatgcaacagatgcaggtgataatggcaaagctcatgcttaatcaccccttctaaggtctgtgtatcatgttcggtcaacatctttggattgatatcgatatgatgatcctgtaaatgatagcgcccgccggttgtttttaaacgccgattgaaatttacttgatgcacaaacggccgattaaaaaactgcaacgataaccgttcaatcaattcagttaaggcttgatcagtcatttgcctttggcgctttcattgtcagttgtacgcgttcacgttcttgatcaacactcatcacccaaacctgaacgacgtcgccaactgccacttcatcagaaggatgtttaacaaagtggtttgccagttgagaaatgtgcactaagccatcgtgtttcacaccaatatcgacaaaggccccaaaatcaatcacgttgcggactgtgccttctaacgccatattcggtttcaaatccgccaaggttaagacatcatgacgtaacaatggcgccgtcatctgatcccgtaaatcacgccctggtttttgcaaactacttaagatgtcggtgattgtttcaatcccgacctctaattcagccgctagagccggtacttgcatttgtgcaatcgccgtcttcaacgcatcgcttcctaaagcatcaacggttaacccaaatgatttcaaaatggctttagccgttggataactttctggatgaatatcagtattatcgagtggattgtccccattaataatccgcaagaatccgaccgattgttcataagctttaggccctaagcgtggtactttcttcaaagcactccgcttttgataaaggccgttttcattgcgatattgcacaatgttttgagcagtagttgctgacaaccctgagatatgttgtagcagctgagggctagccgtattcaggttgactcccacactattcacgacatcctcaatcactgtatcgagttgcacagtgagctctttttgcgccacatcgtgttgatattgtccaacccccactgcttgtggattaatcttgatcaattcagctaacggatcttgcaaacgacgggcaatactaatcgcacttcgttcttcaacgtgtaaatctggaaattctgcccgtgctgcatcactcgcagaataaacagaagcccccgcttcattgacaatcacatagaaaatttcccgggaaatagatttcaaacacgtcgttacgaattcttctgattcacgactcgcagtcccattaccgattgcaatcatttcaacttgatatttctcgagtaaagcagtgaattcatccgccgcttttgatcgtttgtcagctgaagctggtttgtgtgggtaaatgactaacttatccaagaatattccagtgccatcgacaacggctaatttacacccagtccgataagcgggatcaaagcctaatacaactttacccttcaatggtggttgcaacaagagatgcttcaagttatcaccaaagacactaatcgcttgttgatcagctttctcctttaattgcttgcgtaattcacgctcaattaccggtccaataaaccgcttataggcatcttcaaccgcagacttgatgaccattgctgacgctgaatcttgtccatacaacagatcttggctgatccgactggcaattacttgatcgtcaatcataattttagctttcaaaataccttcgttttcaccacggttaatcgctaaatattgatgttccgctaccttcgttaaatcggcagtgaaatcataatagatttgataaacttgcttctcatcggctgcttcgtctttaacttgactggccaactgaccattttgccaagtatattggcgcacccaattccgatattttgctgtttcactaatattttccgccaatatttcatgaacaccagctaaaacagcagctgtatcattgattttttgatctggattgaggtaagcttcagcttttgccaataatgcttgttcggttaagctaggtaaccctgcgataaactgcgcaaaaggttccaagccggcttctttagcgatggttgctttggtccgtcgtttttgtttatagggtaagtacagatcctctaaagcttgcagttgcgttgccgtttcaatttgttgtttgagttttggcgttaatttttcttgttcagcgatatttttcaaaatatcggttttacgtttttcgagcgtcgttaagtattgaaatgtgctttcaatttcacgaatttgaacttcatcgaggcttcccgttcgttcttttcgataccgcgcaacaaacggtacggtattgccttcttctaaaagacctaacgttgctttgatttgttgtggtcgatactgtgttaattgttgaatcacaagattttgaatatcaggcatctgattgcactccttttgcttcaattaaaaaaacagcccccgacttgggaactgtcaactttcgccctaagcgattcttgaaatattttggatgtatttagaaatccgttccgttgctttgtcttgattcatttctgaagctgcaaaagcttgcatatcaacggtttgatcatcatgcatgcttgtaattaaatcttcacagccttgaatgaaatcagcgtaagcaccgattaaacgttggttgttccccatcaaacgagcgggcgcaacaactgttttgaattgtgctaagaattcgtgatattgatcaacaccatctctgaagatttgtgctgtcttttgatagtcttgttcgctcatttcggctaacttaccatcagcaacggctgcttttaaaggggtgaaatacttactcatcccttcttgtactttttcagtattatcgattaaatcgttgacagcttggccgtatttggcaagcttttgttgcgttttattcatgtccatcctcctagtttcctatggtttagtatactaatttcccaatcggcttgcaattaaaatattaaagcatgtgtcattaatagaaaaggcatgcttagttcatcaaaggacatttacctcattaaaaaaacgctagcgacaaaatctcgtttgtcactagcgtcgattattacctatcttctcttcaacattctactcgtccacgactgaccaaacattaactttgtcaataagtcgatacaagcgaaaataactaaataaagtaagaaactcaacaaccaattattttgaacgtgagtaatccgttccagaccaccaaagatgaaaagtgatatcagaaactgtaagaatatttgcatacgtaatcctccctacaaaactcactaacataaaagttatttaatcacctttattatagtttaattgacaagcactttacaaggttggcaacaaattatttagccattctccgctggaagaacttcacaatttccacaatcacaatcaatgagaatgaggctgctaggacaattccccattggtgaatatcgagatgtgacacgtggaataggccgtttaagccaggtaccataatcgttgcggctaacaggaggaatgaagctaagacagcccagttgaaagctttattcttgaaaaagccaactgtaaagattgattggtgcactgacttcacgttaaacgcgtggaagagttgaatcatccctaacgttgcataggccatcgttaacgcatcagcatgtgctaagccgctcgcttgatgcactgggtacgtaatcgctaaggcatacacaccaagcgtaatcccaccttctaagagaccttgatagataatcgcttggaagacaccgccggagaagaagtttgacttgcgcccacgtggtttttgattcataatccccggttcagtgggctcaacccccaacgcaatcgctgggaatgtatccgtcactaagttaatccataagatgtgcaccggttgcagaatttgccagcctaaaatcgtcatcatgaataaggtaaggacttcacctaggttagctgacaataaatattgaattgatttttgaatgttggcaaagactttacgaccttctttaacagccacgacaatcgttgagaagttatcatcggcaagcaccatatcactggcgccttttgatacttctgtcccggtaatccccatcccaattccgatatctgcggacttcaaggctggcgcatcattgacaccatccccggtcattgcaacgactttaccatgtttttgccaagctctaacaatccgcaccttatgttctggcgcaactcgcgcataaactgcgtactgactgacttttttagcaaatgtctcgtcatccatttgatccagttcggcacctgtcacaacggccgcatccgcatcttgttcaggtgtaataatccctaaacgaagtgcgatggcttctgcagtatcccggtgatcaccggtaatcattaacgtccgaatccctgctgaatgcgcatcagttacagcttgtttggcttctggtcgttctggatcaatcatcccgactaaaccagcaaagattaactcatcttcaatcgtcggatcaattgttgctggtaagctatctaacggtttatacgctaatgccaagacacgtaacgcttgtttagctaaatcgtggtttgttttgagtaaaaattgccgttcatcttcatctaacggttgaacatcgccattggcatcaataaaatgactcacgcgtttgagtaattcatccggtgcacccttagtggtcattaataattgaccatctttggcttgatgaatcgttgtcatcagcttccgttctgaatcaaacggtacttcacccacgcgtggtgctgctgctagggcatcttggatcacgaaacctttatcacgcccataagcaattaaagccgtttccgttggatcaccaattaactggccatcctctgtgattttcgtatcgttggcaaggttcataatgcttaacgctaaatcatcgcctgccaagtcggctgatgcttcttgcaactgattattggtaaaaatcttttctaccgtcatttgattcatcgttaacgtcccagttttatcggacgcaataatgtcggtactccccagtgtttccacagcaggtaacttccgtaccaacgcatttcgtttaaccatcttctgtgtcccaagggctaaaataaccgtcacaattgccggtaatccttctggaattgcggcaaccgctaatgagattgaggttaataacatgttaattggtgattgcgcgtggcgtaagtagccgaccacaaatacaacagccgcaatgattaaaatcataatcgttaaactcttaccaagttgacttaaattcatttgcaatggtgttgtggtttcaccagcttgatttaacatcccagcaattttaccaacttcagtttgcatcccagtgcccgtcacaaccccgacaccacgaccgtaagtcacattactattcatgaatgccatgttggtccgatcgccaatcccactttcaggatcggttaacgttgcaacagtcttatcaaccggtaccgattcacccgtcaaagccgattcctcaatcttcaaagccgctgattctaacaagcgtaaatcagctgggacgatatcgcccgcttctaatagcacgatatcaccgacaaccagttcttcactcttgattttaacaatctgcccgttacggcgtacatgtgcgtccggggttgccatctcttttaaagcatcaattgcttgttccgctttggcttcttggaaaacaccaaaaacggcattcaagataacaacggcgagaataataatcgcatctggccattcatgtgctaaaaagccggcaatcattgccgctactaataagacgataatcatgaaatctttgaactgttctaaaaaacgaacgaacaagctttttcgtttagtctcagtcaactgattacgcccgtatttagcgagtcgttcagcaacttggtcttgcgttagcccatcagttgttgtggctaaactttttaaagtctcatccgttgattgggtaaagaatgaacttggttgatctgtcattgtcgtgcctcctatagatagatttcggggtaaaaaaagagacctatagagaattcaaagaatcccccataagtctcactaattaagataacaccagaatattgccttgttggtggcgttatcgcagacaagctgccagttactcccttatcgttaaactaattataagacagaaccaatctaaaacgcaagtaaaacattattctgacgtccaattaatttagcggataaacaaaatccagccgattaacgccaaaatgtatcaaaaacagtaattggtaaatgccgcttgtgcgctgtcttttggtaccacttttcaatcttggtagcagcctcttctgccacttcacgaccctctaaataatcatcaatttgattataagtgacaccgagtgctaattcatctggcaatgctgggcggtcttcttcaagatcggcggttggaatcttttcgtaaaggtgttttggtgcctttaattccgccagcatcgctttgccttgacgcttatctaatctgaaaatcggtacgagatcagcaccaccatcaccgaacttcgtatagaaaccggtaattgattcagcagaatgatccgtgcctaaaaccgcacccttcatttcaccagcgataccgtattgcgcaatcatccgcacacgtgccttgatattacctttattaaaatcactgactgtcacttctgtttccgccagtgcttgaaccattgcatccactgacgctttgatattcacacgccggacctgatccgcttgcatgaaatcaatggcagccattgcatccgattcgtctgcctgctcaccatatggtaatcgaacagcgatgaattgataggtttcatcacccgtttcagcacgcatctcacggaccgcttgttcagctaaagcaccgactaatgttgaatcttggccaccagaaatcccgaggacgtatgtttttaaaaatgtattcttttttaaataatcttttagaaaatcaactgaccgtcgaatttccgctttcggatcgattgtaggttgggtctttaaggctgcgataatttcagcttgtaaaggtctcatgattaaataccaccttttttaaatgttagattgctaacttttttgaaacgcgcttccttcaacagctttgtccggcaaataagcgctagcgcacttattcaccagacttcactatactcaaaagctaaccgttgaatgaaccactctgcttagagcgcactctgattttggacttcttctttgactcttctgatttgggccattttgtgatcccatgtgcgttgtgaaaggtcaactgggtaatcttgcgggttcaagtcccgcttgtattcatcccataacgagtcgagattttcactacagaacttcttaatcgcgccaagttcgggcaatttgtaaacgcgttgcccgtgttcaaaaatcgtccgtagaattggccgcgcattaaagtccgtcacagttttattaatgtacgtgtaatttgggtggaacatataaattgaatcttgttccagtggatcttcatcccaaagcgtaatgtaatccccttcagatttaccatcaacttttttagtgattcgccaaacttgcttgcgccctggtgtggaaactttctcaacattacttgaaagcttgatggtatcgaccatcttcccgtcgccgttttcaatcgaaacaagcttatagacagcccctagcgcgggttgatcataagccgtaatcaatttcgtgccgacaccccaaacatcaattttggcttcttgcatcttcaagttttggatggtcttttcatctaaatcatttgaagcgtaaactttagcatcggtaaaaccggcttcgtccaattgttggcgcacgcgttttgaaatataggccatgtcgccactatcaatccgcaccccttggaagttaatcttgctaccaaattcctgagcgacccgaatcgcacttggcacaccacttttgagggtgtcatacgtatccaccaagaaaacacaatcgtgatgcgtttcagcataagcgcggaatgcttcataatcattgcgatagacttgcacgagtgaatgcgcatgcgtcccactggctggaatcccaaaaatctttgaagcacgtacgttacttgtagcgtcaaaaccgccgatataagctgcccgagtgccccataaggcagcgtccagttcttgggcacggcgcgtcccgaattccaaaacaggatccttaccgaccacagatttaatccgtgcagctttcgtagcgattagtgtttgataattgatgatgtttaacaaggccgtttcaattaactgacattgcgccaatggtccttcgatttgtaaaatcggttcattcccaaaaaccaattcgccctcaactgctgaacgaattgttaaatcaaaatcaagattggctaaataatcaagaaaatcagctggataccccacctcatcacgtagataagcgatgtcactttcggtgaagtgtaagttttctagataattcacgatgtgttctaaaccagcaaaaattgcgtaaccattttcaaatggtaattttctgaaataacattcaaaaactgctgtgcgattgtgcaagtcctttttaaagtaagtaagcatcatattcagctgatacaagtctgtatgcaacaaaagactgtcatcagggtataagtttggcatgttaagctcctaattagagatatatttagtataactatatcataaaataaaagaggcatacaaaaaagacggtagaaaaccgtcttttttgtttgagactagaagaaacgccaaccccatttattaaaatactgtgccatggacttcaagaagatcttaaatcccttgaaactgcggtgggatgccattccataaaaatgagtgacaaccgcgtctggtacatataaaatcgtatgaccgctttggttaattcgatcacaaaggtcattatcttcgaaatacataaagaagcgttcatcgaaaccatcaatagcccgaatcacatcagtccgcgtaaacatgaacgcaccagatccatattgaatcacttgccgtcgatccgttaaatcccggcattcataagccgccaagcgtttttcaaatagcttcttaacccatttaaaaggtacaaagcgcagcatataatcgaagacatctagcttccgccgtactaaatgttgggtcgtaccatccggaccaacaatcttcggcgttagcatccctaagctatcattagcatcttgatccgctaaaatccgatacatccgttcaaatgcgttttgatttaaaataatatccggattgcaaatcagaaaataatcggatgccgtcagcttcaggttggcattatgcccatgaccgaacccaagattctcttggccttcaatgatttcaacatcatctgcagcataggcttttaattgcgccaaatactcaggtgttgacccattatcatgaaccaatacttttaccgggtattgccccaagacagttgccttgatactatctaacgtcttaaagacgtattgactattataggtcacaatactaatcgtcaccgttttatccagattattactcatcatctcatcctaatcaatttttgccataaatttttgtaatgccacttgccaggttggtacttcaaaaccagttgccttgaccttcgtcaaatccatgattgaatgtcttggacggaatgctttttgaggatattcgtctgatgttaccggactcacttctacgtctttatccttcaagatttcgctcgcaaattcataccaagtacatgaattgtcatttgaaagttgatacaagccatacggcacgtcgttttgaacagcgtataacatgaattcagccaacgtccgggtccaagttggacgaccgacttgatcactaacgactgttaaatgatcatgcgtcttcgcaagatttaacatcgtgtaaacgaagttcttaccatattcaccaaagacccatgaagtccggatgatgtagtatttgctcattgtatttgcaacggcttcttcaccagccaattttgtgcgaccatattcattcttaggtgcagctggggtttcttctgtgtacatttgatcattcgtaccatcaaagacataatccgtactaatgtaaacaagcgttgcgccgattgcttcagcagcattggcaatgttttgcgttccaaccacgttcactttgtaattgattgacttgccaggttcttcttcagcagcatcgacagctgtataagcagcacagtgataaaccaattccggcttattcttttcgaagtaagttgtgactgccgctgaatcagtaatatctaactcagtagcatctgtccccacgtattcaatttgattttcatctaataagtgccgtaattcggtccctaattgaccatttgcaccagtgattaaaattttcatagaataaatctcctctattttaattcatccttaacaacttgtaatgccgcatgaatcacttgatgcatatcgtagtaacgatattgccctagacggccaccgaagaccactttgggttctgtcaccgataaatcgcggtatgctttgtataagcggttatttttgtcgttattgattgggtaataaggttcgtcaccacgtgaccagttcgcaggatattccttcgtcacgattgttttattcttatcgcctttaccaaattcaaagtgtttatgttcgatcacccgtgtataaggcgtttcggcatctgtatagttaacgaccgcgtttccttggtagttatcaacgtccatttcttcggtttcaaagcgtaaactccgatattcgagttcccctaattgataatcaaagaattgatcaatcataccggtaaagatgactttatcgtattgatcgatgtagtcttgtttcttatcgaagaaatcaacacccgtttcaacatcgattaaatcactagccaacattttttcaatgatttgtgtatacccaccaattggaatcccttggtatgtatcgttgaaataattattatcatacgttaaccgtactggtaaacgacgaataataaatgatggtaattcggtagccttttggccccattgcttttcagtataccctttgattagtttttggtaaatatccgtcccaattaatgaaatagcttgttcttccaagttttctggttctttatcgcccaacaccttgcgctgttccgcaattttagcggccgcttcggcaggtgttgccacaccccataacttattgaacgtattcatgttaaatggcaagttgtagatttcacctttgtagttagcgactggactattggtgtaacggttaaactctgcaaattgattaatgtattcccagatttctttgttgctagtatggaaaatgtgggccccatattggtgaacttgaatgccatcaatttcctttgtatagatattaccagcgatgtggtcgcgtttttcaattactttaacgtggttcccacgtttggccgcctcgtatgcgaaagttgcgccaaagagtccggaaccgactactaaataattagtcatattattttctcctaaatctaaattattatctcaatcattaattaacgagtaactttctttactaatctgacaatatctctgttaattctagttctcaataatacaagtagcaatacatatacaattgtcacaataattgaattaactaccattgttaagaacaaactaggtaacacaattttaaaattcaggacagcaagaacggtcattagaaaagcaagtacatacctaagctgttcatgaactagataccgtaaatctgcttctttacgaaccatgtaaattctcatagaacatacgataaactcggttaaaataataaccgccgttccgccatccgctccccagatattaacacaaatcacatttaaaataacactaattaccgcacccacaattgccggaattgcatattgtttataatcaccattgaccaatgagaattgactgccaaatacttcaccataggaaataaaaatcattattaaaccgacccataacatattattcgtcattggtgtatatgatttcccataaaaccacggtacaaattcggatgcatttaccattagtaacatagtaaacagttgtgcaactaataatgtatagtcaagtgatgtttttaataactgatccactttttcattattagcatgattcattcgaagttggaccattcttggcattaaaatggtactaactgaagtaataagtgttactaacattcgcgcaatccgttgtgattgatcgtaataagttaattggacaggccctgcaatccaacctactagcgtactatcaaaattggtataaaattgaactgcaagctgtgggataactaaaatcatggcttcttttaaaaagattgacttagaaaagaaccctttaaaacttacttttgtgatgatcccctttaaattaagccagaaaataatatttgcaaaaaagatgcttaaactattaattaatacgtaataacctaaatcactaggtttctttacaaatataaaaatcattgcaacagaacatattttaattaaggtatttcgaacaacaacttttctaacttctcctaatcctatgaagacccaggaaatgtcaattgcgaatccaattaaatatggaatattcaatagcaagtatgttttatattcactgaacattgcaaagaacgtatacgccagaatcactaaacaacctactaaaaactgtattttccataactgtacaaagttactacctagttcacctttatctttgtgggattgggcaataattcttgaacctaattgattcatccccatcaaaatcacaaaactcagaaacatggaaatagacgtaatgaatgaataactccctagtgctcttgcacccaagacacgtgctacatacggtactgtgataattggcaatgccagtatcaacaactggtaaataccgttgtagattatattgttaagcgtctttttcataattgctccatatctttcaatatcctagataatacatccacattattgaccgtttttagcgtagttggcttccacggctgctttttctgcttgccaccagtcttcattgcaattcagcgtgaatttgaccgtcttttttgtttgattttaaagtaatggcataatcattgtcgtccgtagccagctcagtggcatgactaagatcattgctggtatcatgtctgcaattggaaattcgcgaattttagcaattctaaagccagtggcgagcatcaagaggccgccgcaagctttgaaatctgcaagcattgttggattcgttagtgggaaaatgagtttggcgagtaagaaaatgatgtaaaagataatgaattgcggaatcgcaatggttgaaacgacggagccaagattgcaggcaaagatggcaggcaaagatggcagcagtaaagaaatctagaattgatttagaaattagaatcgtattgttgcctgtcataccagcatctaatgtcccataaataccggtcccaccggcacaaaagaggacaatcactgtcacgagtgctgaaataaattcggtatctgatagcgtattgtttttacgcggaaaaatttagaaattggccgttccatcaagacggcaccgcgatcaatccagcgaccgaagtgaatgagtaggccaatcccagtaccgagaacaactgcgaagatgactgcaggcatgttcttcatttgaataatggcattgatgcccattcccatcgaagcaacaccgaagattaaggtgagttctgttttaaatttagttgataatttatctcccaataaactaccgaatagaccgccaaataagacggataatgaattaataatcacgccagttggcattgagaagacccctttaattttaagtttgcatattcaaccataccaatttaaaagaaaagaatcaatttaattttaaatgttagcgcttatatatattcgatgggagtcttgagctagaccaaaaaacgactaatcatttgattagtcgtttttttactgactattcgaatcgcaaactaggcttaaaacgccgaatcagtgccttgggttggttataggcccaatgatttaaaacggcggcaatcaaaatacaggggacgatatccttttcttggttgacagtcaattgaaaggctggaccgctgcttgctagaatggtggtcgcttgcatgatgggttgtgtatggtagataatgcgatattgattttgcgttaaatctcccataattaaccaattaagttgtttgacatagataaactcatgccagacgccccagatctttttgagttgaccaatccgttcatcgttttggaaaaggtcaaagtcaggtgaggggctaattgtgacttggcgaatttcaccgagtaagtcgccggtgagtgagtaaaggctgaatacgtcatgccgaatcccacgctttccaataagtaaataacgcggttgttcttgatcgtcaatcacggttgagacaccacgtgaagcactagcctggtgtttaatgtagaaaataggcatcaaagatcacttcttttcagctgtacgattcaagtcaatcgcgtgataaatcgcttgtgcgacgccgtcttgaatgttagttgcagtttgatagttcgcaagttccttaattgttgggacagcattgcccatggcgacaccaatgccagctgttttgatcattgaaaaatcgtttaagttatcaccaattgccattgtttgctcaactggaatccctctttgttcagcataggcggccaaagcgatgcctttttgagcgtcaatgtggtttatttcgatgttattacttgaagaggaagttacaactaaatccccgcgggcttcacaaaatgccttaattggtgctaattcggtcattccctgtgtgctaaaagcgatgattttaagaatcttaaccgttggatcgttaataatcccttgatagtgatcatcgacgtagttaatattcattaattccaaacgggctgctgctaaagcaaccgcaattttataactcgtatcgggattgaggttgacgagtaaatcagcgacattttggatgcgactgactttgctatctgaataattaccggcagtcgtcatgagttcgaagtaaatattattttcgcgtaaattttctgtgacggctgtcaccctttcggaatcaatcggcacattcaaaacttcattacctaaagaatcaaaaatttgggcaccattcatcgtaattaaagtaggttggatgtcatcactgtcaattagggggagggcttcagaacgactgcggccggtagccaccacgaattcgatgccggcgtcttgggcagctttaatggcggtcatgttaccgtctgaaacctgcattttgtcgtttaataaggtaccgtccatatcagatgcaataattgaaatcaaaggaattcctcctgaaaacgtattattagaaacttacctctatcttagcatgcaagctacttttcttctagcaacttatgttaaaacacgataaactagttaatgaggtgagcagatgaaaacaattattcacaatgagtggcaaacgattctcgcaccagagtttgccaaaccctattatggtcagctccatacctttttgaaacaggaataccaaacgaccacggtttatccagagatgcaccatattttccaagcctttgaatggacaccgtttgaacaggttaaagtcgtcattttaggacaagatccttatcatggcccgaaccaagcccatgggtgtagtttttccgttttaccaggggtcaaagtcccaccatcattgcaaaatatttataaagaattgcagacggatgttggctttcaaccggttcagcatggctatttaaagagttgggcggatcaaggcgtgttcttgttgaacaccgtattgaccgtgcgggcaggtcaatcaaattcgcatcgtaaacaaggttgggaacagctaacggatgcggcgattgctgcattgtcaaatcggggacatgtggtcttcattttatggggaaacgcggcaaaggataaacggcggttaattgatgagacgcaaaatgcggtcattactgcagtacatcccagtcccttgtcagcctatcatggtttctttggctctaaacctttctcacagacgaatactgcccttgagcaatggggcatggcgccaattaattggcaattaccacaaacagtcacggtagaataatgaagcgttaccattgttgacttgtcgcggtattagaaacgttgtatgattacattagcaataataaaatgcttactggaggttgcaattgtggatttatttgaaagcttaaaagcaaagattaccaatcggcaatttaaaattgtttttccggaaggaacagaaccaagaattattggtgcagcagcacggttgaatgctgatcggattttgaaacccattttaattggggcaacgaatgatattcaacaaatcgctgctgctaaaggatttaacttggacgggataacgattattgatccacaagaatatccaacagctgactttgaaaaaatggttgccgcttttgtcgaacgccgcaagggcaaggcaacccctgaacaagcacaaacaattttacaagatcctaattattttggcaccatgctggtttatttaaacttagccgacgggatggtttcaggtgccgtgcattcaacaggcgatactgttcgaccagcattacaaattattaaaacaaaaccaggtgtccaacgcacaagcggggccttcattatgcaacgcggtcgcgataacgaacgttacttattctcagattgcgccatcaatattaacccgaatgcgcaagaattggctgaaattgctgtggaatctgcaaagacggctgagttgttcgatatcgatccgaaagttgcgctgttgagcttttcaacgatggggtctgcgaaagcagacgaagtcacgaaggttcaagaagcagcacggattgcacatgaaattgcgccagaattagacattgatggtgacctacaatttgatgccgcatacgtaccagttgttgcgaaccaaaaagcaccagattcaaaagtggcgggtcaagccactgtgtttgttttcccagaattacaatcagggaacattggctacaagattgcccaacgttttgggaatttcgaagccatcggaccaattttacaaggtttgaatcaacccatttctgatttatcacgtgggagcaacgaagaagatgtttacaagttagccatcattacggctgctcaagcattacaaaactaattgaccgacaacaaagacgccagcacagaaaaattgtgctggcgtctttgactttgcgaacagggcttttttcggtataatgacacacagataacaattagaatgaggcagaacatgttagaatttaaaacaactgatccagaacaaacaattgcgattgccaaacagttgggccaacaagtccaagccggtgatgtcttgttgttggatggtgatttaggcgctggtaaaacaacgtttacgaaaggcttggcagctggtctgggaattgaccgctatattaagagtccgacatttacgttaattcgtgagtatcaagacggtcggttaccactctatcatatggatgtgtatcgattggaagaaacgggcgccagtgatttaggcttagaagagtatttcgatggggacggggtttcggtggttgaatggagtcaatttattgctgaagaactaccgagcgattatttgacgattcattttaataaggatgttagcgatgatcaagttcggacgttagtacttgatccgcacggcgctcactacgaagcattggtgcgtactagttttgcagactagtgtaattgacattcggcccgcgcaagcagcagatgcgcgggcttatttatgctttctaaaggcggtcgctaaagaaacaccgtatgttgcgttaccagcggagttagccactttaacaccattatttactgaatttttgatagcaagtattcttgaatcgcaacaagatgtattattgcttgcttttgatcaacagcaaattgtcggggcaattcgtgtgaatagtccgacagaacaggggctaacacatatcagtgaagttagtatcgctgttttaaaagcgaagtggcatcgcggaattggctctgatttgatggcgcaccttttagcgtcggttcgagaaataggaaatccgcgacggcttgagttaacagtacaagcccgtaatcaccgtgcaattgcactttacaaacggtttggttttgtgaccgaagcacaattagcagccggattttatgcgccagaaacgggctatattccggttgtgcaaatgtgccaattaatgaatatggatgaggagatttaagatgcaacaacaacgaggacgcggaatttacttagccgtattaggatcaatattttgggggattcaagggccagtatcacagtggctattcactgacacggcaattaagccagaatggctaatgggggttaagatggggctttcaggcctatttctattaggttatgcgctcattaaacaaccgaacgatgtttttacagtgtggcggcaaccgcgggactttacgcggatgttattatttgcagtattagggttatcggccgttcagtatttttattttctaacgattcaagccagcaatgcaccaacgactacgattttacaacagctaggcaccatcatgatcatcttaattagcttggtgatttatcgtagagcacctagccgcgttgaactaattgcagtgactgtcgcattgttggggacgtggttgttagtgacaaaaggacaactgacgcatttggcgatttcacacgcggcattcggacttagtttatgccttggcttttccggcgctttaaacacattaattccggttaagttattccaaaaatatccaacattagtgattgtgggctgggcgatgttaatcggtggggtggtcttcacatttgttcatccattttgggtcggtgttccaccgttgaatgtggcaacaatcagtagtgtcttattcattgctttgtttgggaccgcgctcgccaatctttgtttcttggggagtttacggtatatcacaccgacaacggctggtttattgaatacctttgaaccattagctgcgactatcggtactgttttattcttgaaaacgagtttcaacacctgggaagtcgtgggtgggattctcgtgatcagtacggtctttatcttgagttttggtcaatctaagtcaaaataagttaacacgatgaaccgaattgtggtataattaacagcggaaacaaagctcgtacattagtcaaaacaaattaatgattatgatgaagttgttaatcttgtcgaagccctaatgacaatttagctttaatccaccattcgctaaaagagcggttagcctgtctgcatagacaagttaaccgctctttttttgttagccgattaatttggtggccgcttttagcggttcaacgccaaaatcgttggcttctttaatcagaatcttggcacaagcgatactatcagccagtgcattgtggtgattgtcaagtggaatcgctaggttatcacacaaggtgtttaacttatgattctcaaattgtggatacaaccgccgactcgtcttgagagtatccaacgctaaataatggggttctggaatgtcgtagtgttggagtgtacttttcaacacaccaatatcaaaattcgcgttgtgggcgaccactaacttgtttggcgtgaaaaatggtgcgatgtgcggccagacttgattgaacttgggcgcttgagccacatcggcttcatgaatgccatgaatttgcgtattgcgactgctaaaataagtttcaggtttaattaacgtataaaaactatcaacgatttgatcgttgcgcacaacaacaagggcaagtgagcaagcactatgctgttgaccgttggcggtttcaaaatccattgcgacaaaattcattattttgaacctcgctttttataaagtttgcttattttaagcgaataaatcttgcgtgtcaagttcgacggggcagtggtcggaaccaaaaatttccgtgtgaatcttggcatcgactaatttaggttggagatcattggaagtaatgaaataatcaatgcgccagccggcattattgtcgcgggcgtggaatcgataactccaccaagaataaatatcgggttgatcaggatagaaataacggaaggtatcggtgaagccgcgatttaagagggttgtcatttgccctcgttcttcatctgaaaagccggcgttatgatgattggtcttatcatttttcagatcaattggttcatgggcaacgtttaaatcaccgcagaaaatgacgggtttttgagtcgataaatcagcgatataagtttgaaaggcattctcccaacgcatgcgatagtctaatcgtttcaacttatcctgtgaattgggtgtgtagcaagtgattaaataaaaagtagggtattcaagtgtaatcacgcgtccttcttgatcgtgttcaggttggccgataccataagttgcagtgagcggtttatgcttagtgaagatggcagtaccggaatagccttttttttcagcgtaattaaagtattgatgataacctggtaaatctaattcaacttggccggcttgcatcttagtttcttgtagacagaaaaaatcggcatctagttgattaaaagtggtcataaagtttttttttaaaacggcgcgtaagccattaacgttccaagaaataaatttcattgtcgatccctcatttctaaactccattttaacggtctagtcaataatacgcaaaaaaagtgttggctgttcaattcaagccgtctttgttaaactaggagtagattattttttgaggggaacgacaattgtgacaagtcaagttgaagtatttttacaagcaaaccaagcaatcgagattcatcaagcagaaccattgagcttatacacctttaccaaaacaggtggaccggcagatttactcgcactccccaaatctgttgcagaagtgcggcaattagtggccagtgccaatgaactgacattacccatcacaattatcggtaatgctagtaatctaattgttcgtgacggtggcattaaaggcttagtcatcatcttaacggcgatgaatcagattaaagttgaaggtaacttggtgaccgcgcaagctggagcagggattattcaaacctctgaagcagcttatagcggtagtttgaccggcttagaatttgctgccggcattcctggtagtgttggcggtgcggtctttatgaacgccggcgcatatggtggcgaaattagtgatgtactgacccgcgttgatgttttaatgcgcgataatcaagtacagacgttaacggccgctgacttagacttcagttaccggcatagtttaattcaagataacggcagtattgtgttggttgcctattttgaaatggcaacgggtgcggcaccaacaattcgcgcccggatggatgaggtcaacactttgcgggctgccaaacagccgctagaatatccctcatgtgggagtgtctttaaacgaccagtcggtcattttgtcggaccgttgattcaaaaagcgggcttgcaagggcatcaaattgggggcgcacaagtttctaaaaaacatgccgggttcatcgtgaatattgatcacgcaacggcaacggattatttgacgttgatcgaatacattcaaaaaacgatctgggcgaagtttaatgtgcgcttagaaccagaagtccggattattgggcaacataagcaaggttaaatcaatgatgaaaagctatggtaaaagatgattttatcagggcttttttatcaggatgagcgttttaaaaagaaagggtgttgggatggcaattattgaagctgttattttgttaattacgttggtgattattgccaatatcatcgggcattatttgccaaatttaccggttagtttaattgagatcgggttgggattaatggtggcgttagtctttgccgtcaagattccactaaaaacagattggttcatgttggtgtttgttgcaccattattgtttaacgatggccgtcgttttcctaagaaggaactatgggcgttgcgcggaccaattattgggaatgcgattttcctcgtctttgcaacgacgttaattggcggcttggccattcattggttagtcccggcgttaccgctggctgcaagttttgcgttagcggcaatcttgtcgccaacggatccggtggcggtacaatcgatttcagaacaggccgatttaccgccccgggttttgcacttagtgagtggtgaaagtttaattaacgatgccagtggcttgattagctttaaatatgggattgctgccgctgttaccggctatttctcatggcaacaagccgcgggcgattttctgtatattagtattgttggcgcactagcggggatgattatcatgttaatcattcattttattcgcctatttatgctacaacaaggctttgaagatgtgatgttccatacgattttacagttggtgacaccgtttatcatctatctaattgttgaagatctattccacgcatccggtgtgattgcggtggtggtagctgggatcatcagtcattcatcacggaatatcttcctcgattttttaccggagttgaagttagtgaccgaacaaacttggtcaatcagtgtttacttattaaacgggattgtctttttaattttagggattgaattacctgtcgctatgcataataccgtgcataatccgctgattaatacgagtgaagaaattctcctcgtcttagcggtttggttgattctggtgattgtgcggggactctggacactagcttacttgctctacaccaaccagacgaatcccaaaacattccgcgaaaacattaaaattgcggtgctctctggactttctggggttcgtggagcgattacgatggccggggtattatcggtgccaactgttttagcggatggttcaccgtttcctcaacgcggcttaatgctctttattgcggccggcgtgattattgtcagtctggtgatggccgttgtcttaattcctaagctgacaaaagtcaaagcaccaatcgagatgcgagggatgcaacgagatcttgaagccgaagcagccgcagaagatgaagcagctgctgatttattggatgaaacaaacgctaagatttacatgtacaaagtagcagcgagcatggtcgaatcccaacggcatattgataataaccgggctgctttagatttattggcagagtatcagttgatgatccgccggttggagagtcaacaaagcgaagcaagcacaagtgacgaactaccaccgttaattgctgaagagttgattttgcgacaagtggcatttgacggagaacgtcagaagttagagttgttatgggctgaaaaggccattagtgctaaaagctatcggcatggtaaacgtaagttacggcaaaaacaagtaatgttatcggttattgggacgagttttaattggcatcatgtgcaactacaagtctatcgtgcttggtcaatcagcaaacgctttttgacgcatctctggccgcggcatatcaaatcaccaagtgaaaccgagtggcaattgactgaacgtgaaatggctaaggcgggaattaaacaattgtcgtatttcctaaaacagcctgaaaatcgccaacgtcattataatcgtcaggttatttatcaaattattgtgcggtatcggaatcagattgaaaacatgaaaaatggggggcggagtaagaccgctatctatgaacgtcaattacaaaaattaagaatcaaagcgctcacgagtgaacgagtggcgattcaagagttattggaacaacataaaatttcatggcaacttgcagatgaattacgcaaaaacattaactattccgaaaatgcactgattttagcacgaacggatactgaatagattcaaaaaagccccacgcactcattttaaattgagtgcgtggggctttttttgatggttagaataagtggcggcggcggtagtatttgtagctgcaataaccaccaattgcaaagccggcgctgattagtgaaatcgtcaaaccccaatagaaataaggtggccagtatttaagggtaacggtatggtgaccttttttcagcgggatggcgatgaagttcttcaagccgcgtttgattttaaccggatggccgtcaaccgttgcatgccaaccagcagcataggggacggttgtcatgaggacttggttttgttgaggaatggtgatcgttcctttgatggttgtgtttgagaaagtattcagtttcaatgcatgtgcacgaagttgctgcgttaggtgcgtcaatgcttgataattcaaactatataaattaatattttggagccaaatttcctttttagagaagctaaggtcaacggtttgttgttggccgattgcgttacttgtcaggtttaagacgacagtatcgcggaaagtatcgtattgttgtagcgtgtgaccgtttaatgagacctgaaccgcatttttttcgaggtttgagcctaatgtgaggtaataggggtcactcgttgtgggtgtgaaggtatagatgacgtgagctggattcttcggatcaacccggaggaaagtttcgttgagttttggtttttgtttagcattcttgtaagtgacagtattgaaaaattgaagtgtgaagagtggctgttctgtcgctgaattgactaagtctgccgcaatctggttctgttcaaggatgggataattggcaaccacatgatgtttaagcactttttcagaggccgcaaagcctaaatcaagtgcgttggggttttgataaattgcaatttgatctttttttttgagtaagttataacgtgctaagtccggcttattcgtactgagtggaattgttgcttgcccactagtattgttaaggtagtagcgataacctaataacgcatcggtgaacagggtctgattagtatcggcaacggcgccatcgccagctggttcgccaatgctgcccatgaatttcggatagctcagttcgagcatcgaattaaaatgagatccgccgaaataatcagcttgcatcgggtcattttttgtccgcataaaggttttgccaattcgttgaaacgcggttttatttggaattgcgctaatggctgattgtaaatgagctgtataatctgcgtaatctttttgtgagacatagctaatttgattaagactcattgtcgcgttggtgaccatctcaccaccgacgcatagaactaagagcaaaggataatagcgcttgagcggctttttcaggagtaaaagcaagcatgtcatcagtaagaaagcgatgcttaagttaatctgattaggacttagcgcggtgaagctcttgagatgtttggcagtataaccaaaagccgccatcaacattaaaaacggcaacaagagttgataccaactaaatcgaaggtgctggtggagccgttgaaccgcgagcacgattagccaaaagctaaccacatatgaaaagcggtaaggataccaaaccggaaattgcatgccgtgccataataaatcaaggggttcataacacattgaaacacctaagaaaatggtgactaataaggcaactaaccgttcttgccaggcaatcttgcgtgttccaaaatacaagatggcacaaatcaatacgagactgccgacgaatatattcggttcgccttttggcatttggtcgaagttaaaattgccaatcacaagtttagaaagcatcttaagcggattatattcgaacttccaatgaatcttttgaatggtgtactgccctttgctctgcgtcaattggaaaaaagttggcaataggagccaggctgagagtaaaccggccaagagtgagccactgatgaagcgggcagcgcgttgccatagatggcgccaagtttgccaataatgagcacaagcccacgcaaaataagcaatgacaaacaggcaaaccatatagcccatataatagttactcattaagagtgcggcaagactcaatggataaagccaaaagtgacggcctgtaaagagccggtcgatgcctaagacaactagtggaagccagacgagtgcatccaaccacataacgttaaactggttggcaattgcaaacccggataaggcgtagacaacactaagtgtcggtaaccaccagctatggagtagtttgttagattttaagtagtacgcaaagctaagaccactggcgcctgttttgaaaaggacaagcagccaaacaccaaaactcaaccaagttcctggtgtcaataggacgattagattgaatggactcatcaaatagtaagcccagaccccaagcatgtcgccccctaagcccttagcaaaggaataaaaaaaagtttcgggatggtgcaatagcgtacttctgaaaaaagcgtaaaaatcgatgtattgttggcctagatcaacagtcaggattgtttgccctccaaaagggaacacttgtcgaagtagtccgtagataaataaaatgccaaatggtagtaagaaactaaggcctaatgtataatgacgacgtgcaaaagcgtaaaatcgactcacggtaatcctccaattaataaaaaaatctaaaaattaggttgctagtccgtttttaactgagaaaagctgtaaaatataaccagttaatgactatgcttaagcataccataatctcgtttgaatttagagatttggcatagcttgtttaagataattttgctaaacttaaacaatacagcacaaaatcgctcaaaaggtcgcttggcgactttttgaagcatagagcggcgccatcttttactagagcggcgctaaataaggagtatctgaccgtctgtgaaaatcattaagagaaaaaacaaacaaaatcgtgaaaaatcactgattccattccgcttaaatttcctattattcgttgtcttcgcgttatttgccgcgttgattatgcaattgggacgcctgcaagtgatggagggcgctaattttcaagcgatggtcaacagtactgataagaaaatcgttacaggtaacgtgcctcgagggatgattctggattcaaagggccgtgtcttagttgggaatactgctaaaccggcgattacttatacgaagaatatgaatgtcttggcagacaaaatgtatgcagaggccaataagttaacccaatatttaacggtcccgacggataagttaactgaacgtgatcagattgactactacctcagtaaccccaagaatcttaaaaaatggaacgcaaaactgcctaaatctgcgaaggttgccagtgatggttctgagttgccagaaaagaaggtttatcaatcaacaatcgaattggttaaaaagtcgtttaaagggttaaacgagcaacaaaaacaagccgctgcgattttcaaaattatgagtggggcttatcaattatcgacagtttatattaaaaatacggatgtgactgataaggaaattgctgaaatcagtgaacatctaacgagtttgccagggattaatgtcagcaccgattgggaacgggcttatcctaatggcgattcaatgcgcagtattattgggcatgtttcaactgaagagcaagggttaccagaagatggcgtcaactccttgctagcacagggctattcgcgtaatgatcgcgttgggaccagttatttagaaaagcaatacgaaagtgtcttgcatggttctaagtcgcaatcacaagttgaagttggtgcgaataatcagattctctcaagtaatgtcttatttaaagggcaaaaagggagtaatttaaatttaacaattgaccaagcttatcaaacgcaagtggaagcggctttgaagaaagtctatgatcaggcaaaagcagcgggagccactcagtattctgatggtgcctatgccgtggcgatgaatccgaaaacaggtgctattttagcaatggctggcgaatccaacgatcgtaagtcaggtgaaattgccgatgatgcgctcggggtgattaatcacaccttcgtcatggggtctgctattaaaggggcgaccgttatggggggcttaatggatggtgtgattacgccaaccaataataccttaccggatacaccaatctatttaagaggaacgccggttaagaaatctgtttacccagttgggacgtttggatcattgaacgctgaatcagcgttggaagtttcttctaatatttacatgatgcaattagcgatgttagaagggcatgccaaatatgtacccaattcttcgttaacgatggattcagatatctttacgaagatgcgtggctacttcagtcaatttggcttaggacaaaagactgggattgatttgccaggtgaagccaccgggatcgaagggccaaccgtcaatgaatatggcgagccagccaatggttcattacttgatttatcttatggtaactacgatgcctacaccttaattcaattggcacaatacatttcaaccatcgcaaacggtggtcaacgaatgaaaccataccttgtggattcgattcaacaaactggtaacgatgggtcagctggccaagttggtaccaagaccacgccgacagtgcttagcacagttgatgcgcccgaaagttactttaatgtcgttaaaaaagggatgtacaacgttgtcaatgggaccaacgcttgggggacagcacacaccttgaaagatattaaaccaacgcttggcgctaaaaccgggacggcacaatcatttgcccgtgaagatccaaacgattcgacaagtaagcaagtcgaaaccgttacttctagtttggttggctttgctccatacgataatccgcaagtggcaatcgccattgtgttcccgaacttaaactctgataaagggcactacaatacgttactagcccgtgaaatgattacgagtttctataaattaaataacattactgaatgaaatattccaaaataaccttttcagataccataaaaaatggtatgatactaagagtctaagaattaaacagttttttagaaatttacttacagcttggaggctatatcaatgcgtgttcacattacaatggaatgtacagaatgtcacgaacgtagttacttatcaaacaaaaataaacgtaacaatccagatcgcttggaattaaagaaatattgcccacgcgaacgcaaagtaactttacaccgcgaaactaaataatagtgacgcacatcaaaagtcggggcgcttcgcgctcgggcttttttttattaaggaggcttttgaatgcggactaaaaagcaaattcggcaacaacaaattgcggcattacaaacgcttgcgcagacgcctgcgcttaaacatgcccaagaagcacaacttttggaattgttaatgacaaccgaggtgtttcaaaaggcaataatcatcggtgtcacgttgagtcagccaattgaaatggcgacccagccggtaattgatgccattcgtttggccggtaaagaagttgtagtgcccaagacattgccagagcgacaaatggctttttacccgttaacggcaaccactgaattaacaacgagttcctatggtgctttagaaccagtggttacagctggtagccaggtgttaatccctgatttaatgattgtgccgggactagcatttagtccagaaggttggcgggttggttttggtggcggttattatgatcgttatcttgccaaatatccaatgccaactgttgcactagcgcttaaaccacaacaacgaagtgctgattgggccattgatgaattcgatatccaactcgatcaggttcttcaggtctaaaggagaaaagatgactaattttaaagaacgttggcaagacgcaccgattgtggtgtatgccttgatgttactaacgattttgatgtttgcaatgatgtttttgaatccggttgtatggttgaacggctttacatcggttaacatgctaatgaatggccggattattgggtttatgatggcatctgtcaatcatggccggtttatgaatctcttcgtagatttggttattttgttttttgttggtggacaacttgaacgattattaggacactggcgcctattagctatctatatactgagcagtttggcgagtttgtttacaacgggcgctttttttggtctcgatacaccaaccgtgactgctggaacagctatcttagggctattcggtggcttcttgatgttaggtgatgcctttaaagaagaatccgtgctaggacaagtggcacgccagtattggctgtttttatttttaacaatcggattacaatttattgtcgatcacaatgcattgtacgcaatggtaggtggggtacttggcggctttttaagtagtatggcgctgggtgcacctaaagtgggtaagattgacccgctgaaccgtgtggtgagtgggttaatttatgttgcaacgatgattttatttggttttctgggtatgaatcattaatcaatttatgtataatgttaaaggtgaagttgatgagaactctatatgatgtacaacaacttttaaaacaatttggcgtttacgtccatcttggtaaacgactttgggatatcgagctcaccagtatcgaattacggcacgtttatgatgcggggttaatcgatggcaaagtgtatcgtgatgctaagatggttttagtgcgtgaacatcggttggagaaaaatgaagcgtttaatcacaatttattggaggagaagtttaaatgacagacaagaagttaatcggcgttgatttaggcgggacaactgctaaatttgcaattatgacaatggatggcgaaatccaacaacgctggagtatcgatacggatattttagatgaaggtagccacattacaccggatatcattgaatcgattaatcatcatttagatttatataacatgacacctgctgatttcatcgggattggtatgggcacacctggtagtgttaacagtaaagaagggaccgttattggtgcttacaacttaaactggaagacaacccaatacttacgtcgcgatatcgaagctggcacacacatgaagcttgcaattgataatgatgccaacgttgctgctttaggtgaacgttggaagggtgctggtgaaaaccaacccgatgttgcttttgtcacacttggcactggagttggcggcgggatcgttgctgatggccatttattacacggtgttgctggttctgcaggtgaattaggccacgtaacagttgaaccacatggttatgaatgtacgtgtggcaaacaaggttgtttagaaacttatgcttcagcaaccggtgttgtgcgcgttgcacgtgacatggctgaagaatacgctggtaattcaaaattaaagacaatgttggatgatggtgaagaaatcagctctaaattagtttttgacatggctaaagaatcagatgcattggctgttaaggttgttgatcgtgtttcttactaccttggtttagcattagctaacgttgggaacatgttgaatcccgcttacatcgttatcggtggtggtgtttcagctgctggggaatttttacgtaaacaagttgaagcttactttgaagaatttacattcccaaatgttaaaaatacgactaagattcgtttagcaaacttaggaaacgtagccggtgttatcggggctgcttcacttgcacttcaatttgatcaacaataatttgttataagggagtcttatcgatgcttgtattagggacaattaatgtatgggtagtaattaatattattctgatcgccattttactttggttcttgggcgattgggcatattatcaaattcaacgcaaacgcttaggcggcgaattaacggaagcggcgtttgaagaaacaatgcgcaaggcccaaattgtcgacttacgggataaaaaagattttgatgcaggccacattttaggcgcccgcaacttaccttatccaatgttgaaacaaaatatgggtgaactacggatggacttaccagtctacttatatgatgcaggcattacgctcagtatccgagcagcactgaagttaagaaaagctggtttcaccgacattaaatggttgaaaaagggttatgctggttggaccggcaaaacaaagcgtaaaaagaaattaaattaaaccaaaaaagcccaagagttactagcgaaaaaaactagtcaactgttgggctttttatagagtgcgcaggcagatggtcatactctgaggattagtggcataccgtaaatgagcggcagagccgatcgtttacggtatgtaactaaccgaaagagtatatctggcggcgcacgtttcaaaacagagtgcgtttaaagcggtttgactctgagcattagcatagtgttgttaatgaccgacaaagttggtcgtttgcaatacgaagctaatcccaagagtcagctttaaaaagcacgtttccacaaaaaaagtccgtcgccaatcaggcaacggacgcagtcttttcaaagcgcttagccttggtgagctgaatggctcttacggttagcacgtcgacgactttcttcaatttgattttctttttcttcgattggatcaacgacggtcttcttaaatgccaagagtgaaccggcaatcgcgccgactgttgaaacggttccgattacgaaaccttttagaaatttatgtttcataggtaaagcctcctcaagtctcaattcattcaagtacaactttattatcgcgtatttaagcgcgaatagctagtaaaatacgttaattaatgtggtgaaaatatggaaaaagaaaagctaatcgtcattgttggtccgacaggcgttggtaaaacagcgttaagtctacaactcgcacaacagttgcaaggtgagattatttccggggatgcgatgcaggtttatcgccagttagatatcggtacggccaaagtcacaccaaaagagcaggcgcttgcgccgcaccacttaattgatgtggcggatatcgatcaacgcttcactgcctttgactttcaacagcaaggacaacaactcgtcactgaaatcgtcggccggcaacacatgcccttggttgttggtggaacgggactttatttgcaggcgttactgtacgatatgaccctgggtagtgcgcaagatgcggaacagaattttacgattcgtcaaaaatggcaaacttttttggatcagcattctgaagaagctttgtggcagatgcttaatcaaattgatccgcaagcagccgctaaaattccgagtgcgaatccacggcgtgtggttcgcgcattagaggtttatgaaacaacgggaactttgttttcacaacaaaagccaaaagaattacgttatgatacgtttattattggattgaattgtgaccgtgcattattatacgagcgaatcaaccagcgggtggatcaaatgatcgatgctggacttttagaagaagcgcggttggcttatgcacatcgtgaaacgagtccgcaagccgtgcgggggattgggtataaagagttcttcccatactttgatagtgactgttcattagacgtggcaattgctcaagtaaaacaaaattcacggcactacgcaaaacgacaactaacgtggtttagaaaccagattccggtcaattggtataatctggttgaacaacctgaagccgatttggctcggattcaaaccgatttacaacaatggttacagcaataatagaaatggagtggttaaaaaatggattggcaagcaaacttagcaccagaattacaagctaaaatcgcagcagttgatacgcaaatcgcaccgcgtttacaagcactggatgaacaaatcatcaataatcaagcaaaggtgctcgaagcgtttcaagcagaaaatatttctgaatcgcatttaaacgggacaaccggttacggcaacgatgatcaaggacgcgataagttagaggccgtctatagtcacgttttcaaaactgaagatgcgcttgtgcggccgcaattggtttccggcacacacgcgattggaacggccttattggggatgttgcggcctggcgatgatcttttatatcttacgggcgaaccatatgatacgttgcaagaagtcatcgggatggccggtaacgggattggttcactaaaagaattccaaattggattcgattttgtgccattattagctgatggtgccgtggattttgaaacggcccggaccaaaattacagctaagacaaaagtggtcgctatccaacgttcacgtggctatgctgatcgcgatagtttcacggttgataaaatcaaggaaatgattgcctttgtcaaaaacattaaccctgaattgattgtctttgtcgataatgcttacggtgaattctctgaaacaacggaaccaacagaattcggggccgacgtaatggccggttctttaatcaaaaatgctggtggtgggattgcgcaaacgggtggttacatcgtcgggactgaaaaattaatcgaaatgattggttatcgcctgactgtgccaggtgttggtgccagtgaaggcgccacacaaggcaatctgcaattgatgtttgaaggtttcttcttagcaccaagtgtgactggtaatgcgattaaaggggctgtttttgaagcagcgcttttggaacaaatgggcttgagtgtctcacctaaatgggatgcccctagaacagacttgattcaaacggtgaacttcggtaatccggatgatatggttaagttcgctggttgtgttcaagcgcaatcaccaatcgattcatttgtgacccccattccaagtgattttgccggttacgaagatcaaatcgtaatggctgccgggacctttatccaaggtgccagcatcgaattttcagcagacggcccattgcgcgccccatatacactttacttacaaggtgggttaacttacgcgcacgttaaactcgcgattagtcgggcagtccaaacaaccttctttgaaaaataaatgccaagcggtcaatcaaattcgcgtttgattgaccgctttttttgtgcgttaagcatggtatgataagggtgcaacgaatcgtagcggtcggttttaagagatgctttggattgttgctagtataaatgtgtcattctcgctacggtaagtcttggaggtggttagatgttaattggtcaacaattaaaacaatttcgtttggatgcgggctactctcaacagacactcgcagagcagattaatgtgtcacgacaagtcatttctaaatgggagacggataaaagtgcaccagacttgaatacattggttgttcttgccaaattgtataatgtaagtttgaatactttgctcggggttgaaacggtcactaaaccgaattcattctttgggcggttgcggcaacattggcatttggcagaaagcgaaaatacaaaaccgctgtccgatttaggacggattatgcaacaacccgaacaacactatgtggatttagcacaacagttcagtgtcactttgacggatgtaactgttactagtgatggccaaacaatgccagcgaattggcggcaagcacggagtccttatttaattgtattagaaccgcgccaaatttttttaaagcagacagatgttttaaaagtcatgcccgcaaaagttgttaagcaacttgcgacaacggaaattcgaacaattcattatgcggtcatgcagactgctggaccatcaaccattggcgggttacaaggtatcgggcacgcttatcgggccatcgtgacggttgatacaaagcaatccgtagcaccatactatattaccaaccaggattttcttcagttggcaaaagttctgaaagcttatgcacaacaggaacacgttcaatttgatgatcagatggctttgctgccttattttatgacgcatgacacaactgactgctttaattatttagaggtacattacagcgaattagcggaaaaagttggggttccagcagaaagcgcaggacaggcggtttatcgatggtagatgaaacagcaaaaaacaactttgaaacggcgacagatggggttcaggcttatcacaattattttggcacgccaacgcacgatgatcgtatttggtttgaactcttaacagttggggtcttccaagtggggttgagctggaaagtagctgcaagtaaaataccagttctgcgacaacaaatggtggggatggtgattgatcaagtcgcacaatttgatgaaatggatgttgaacgcctgcaaaaagaaccagatatgattcgtaatacgcgtaagattcgggcaacgattcaaaatgcgcgggcaattcaagccatccaaactgaatatggcagtttttcagcgtatttgtgggcgtttgttgatggtcagccgcaattgcttgattcacaaatggctggcgtgtccgataaatcagcgccgatcagtacgcaacttgcgaaagagttaaagaagcgccagtttaaatttgttggaccggtggtaacgcatttgtttatgcttgcaggtggtttgattcaaatcatcgatgaagactaatgcctaaaaggtaaaccaaattggtttacctttttttgttggctgatgttagaaaatctgacatcaaatgttgaccgtttgaaaggcgactggtaagataaaacgcaagtgaggtgaaatggatggctgaaaaacacttaaggcgcaacttagcagttttaccaattggtacggtaatgaaattgacgggacaaactgcgcgtcaaattcgttattatgaagcacaggcgcttgtttttcctgaacggacaacgggccatcaacggttgttttcgttgaacgatgttgatcgtttgttggaaatcaaggattacctagctgaaggcaccacgatggcacagattcgccagatttatcagaagaaggcggatcggcagcgtgataaacaattatcagacgaaaaagcgcggcggttattggccaacgaattattatcggtcggcggcttagttggacaacagtcaaccatttcacaatcatctaaattatattaaggggcgacggattaatggcacgtaaagtattgacagcagaagcaatcaagcaattagtggatcaagaaaacgttaagttcttacgtttaatgtttacggatatcaacgggattatcaagaatgtggaagtaccaattagtcaattagataaagttttaagtaacaaaatgatgtttgacggttcttcaatcgacggttttgtccggattgaagaaagtgatatgtatttgcggcctgatttaagtacatggctcattttcccatgggaagcggaacatggaaaagtcgcgcggttaatctgttctgtctataccgcagatggagaaccattcttaggcgatccacggaataatttgaagaaattagtgcgcgaaatgcaagataaagggttcaaagactttaacattggaccggaaccagaatttttcctctttaaattagatgaatacggcaaaccaacgttgaaactcaacgaccaaggcggctactttgattttgcccccgttgatttaggcgaaaactgtcggcgtgatattgttttggaacttgaaaagatgggctttgaagttgaagccagtcatcacgaagtcgcacccggacaacacgaaatcgattttaaatacgctgatgcagtcgatgcagcggataacatccaaacctttaaattagtcgttaaaacaatcgctcggaaacatggattacatgcaaccttcatgccaaaaccattacacggtgtcaacggctctgggatgcacattaatatgtcactctttaatcaagatggtacgaatgccttctacgatgaaaaaggtacagaacaactttcaaaaacggcttatcatttcttagctggcttattgcaacacgcacgcgccatcacggcaatcaacaacccaacagttaactcttacaaacgattagtccctggttttgaggcaccggtttatgttgcatggtctggtcataaccggtcaccattgattcgggtcccacaatcacgcgggttatcaacgcgtctcgaactacggagtgttgatccaagtgccaatccttatttagcaatcgggtcgattttggcagccggtttatctggcttagatcaagggctcttgcctgatgctggtgtggatcgcaacatctatagcatggacgaaacagaacggaaggaaaatcacatcactgacctaccatccacattgcacaatgcattgaaggaactagccaaggatgagattatcaaagattcaatggggccttatctctaccagagcttcatggattctaaatcattggaatgggcagcttatcgtcaacaagtttccgaatgggaacgcgaacaatatttggaactctattagtcgcaatttacgccatgtttttgtacaattaaactttagaaatagaaagttggtagagtatgaaaacattggtgattatcagccatcccgagattgagacgtcgatggtccaaaactttttaaaagcgagtgcagcaccactggaagccatcacttggcaccacttagatgcgcttgagacgttagatgtggctgctgaacaagcattattacgcaaccatgagcggattatttttcaatttccgctctattggtatgctgctccagcgagcttaaaaatgtggttggacaccgttttaacggggcaatttgcctttaatggccgccaaccattagccgggaaaacactaggggttgtcgtttcaactggtacggcggctaaacattttcaagctggcggcagtgaacaagcaacgctgtctgaaattttgcgcccatatgaattggtggctcgtaagctagggatgacctatttaccaccacttgcgattcatcaattgggttattggcaagaaactgataaacaatgcttggtcatcgattatcaacggtatttgacgcaatccgagttcaattttgatcagcaattagcgtggtttgaagcgatgctgactaaaaaggctgctgaagccacatcgcctgaagcgcaacaacgtttaatgcttttaagcgaacaattcgccgacaaacgatcggaattaaccgatttgaattggcaagtccaactgattcgcgaagaagagggggaaggctaatggattggttaacagaacaaattcaactacaaaaagaacaagccacaacgtatgaagagcaagctttttatacggcgcttcaacaaacgagtgatgaactagcattacggattgaacaacgccaaggtgaacttgatggtcgaatctggaatgcaacgaattggtaaactaatacaaaataaaaaacgccgcgacgaaagtcggggcgttttttgtgtaattcgattaatagcgtttgattaatgtatcgaaagcatcaacgattgcttggaagaaaccaagtgtatctgggtttgtgatttcttgattgtcatctaataagttcatgacattgccgatataagcttctggttgttgaaccgttggcatgttcaagaaaacaagtgattgacgtaagtggtggttagcaccgaaaccactgattgcaccaggtgaaacgctgacgatttcagctggtttgttatcccagatgcttgcaccataaggacgtgaaccaacgtctaaagcatttttcaatacggctggtactgaacggttgtattctggtgtgacgaataaaacggcgtccattgtcttcattttatttctgaaagttgtgtaagcttctggtacttgatctaaatcatcataatcttggttgtacaatggtaagtcaccaatttcaacaatttctagattataatctgatgggaataatggcatcaatgatttagcaactgatttgctaaatgaatctttccgtaaactaccaattaaaactgcgatattttttgtcatagtgaaacctccaattgttttacttattattagtaagtaactttagtatagcacgttcccctgaaaaggcaaccacttttacttactaatttaagcatagcgaattggtgaagcttttagcaaacaatatggtcggccattgattggcattggcaagctataaatcgtataatagcagtaagtagaacaaagatgggaaatgaataatggaaattaaatggcacgtcaatcaaccacaatctgttaaacaattcttgctagcaagtggcatcagtcaacgattgtacgccaaaattaaggcgttaggccaaccgattctagtaaacggacaaaaaagtgcgcctagtgatcaggtacaatgcggcgatgtggtcacattgcagttaccagctgaaccggccgatgaatcagttgctgttagtcacgaaccaatcactatttgttatgagaacgagtattggttggcggtcaataaaccagctggcttggcaacgattccgggtcccactaatcaaacggatactttgttgaatcgcattaagggttactggcaagcgcagggtgcaacagatttagtaccgcatatcattacgcgcttggattttgatacaagtggaattgttttagtcggcaaacaccaaattgcacaaagtctattgcaaccgcagattgaacagcatcaattacaaaaattctatttagcagttgtttcaggaacgggtttaccagcatcaggggatattcgtgaaccgattggacaaatcgaccatcaaccgcggcgtgcggtgttggcggatggtcagtcagcttggacgagttattggcacttgggtgcatcgggtcagttgacggcggttaaagttcagattcatactgggcggacgcatcagattcgggttcacttcagcgcgttaggctatccattggtgggtgatcagctctatgatgggccgcttgatttagggataatgcgacaagcattgcacgcgtatcgactgcaatttcaagatccattcagtcaacaatcaatctcgattacagcaccgattgcagccgatatccaagcgattctacctacagaacgattaccaattgattgattcaaaggaagatgacaaatgaaaaaatggcaatggttactaatttgtatcttgtgtttcggcattggtggggttatcggtcatgtagcgactggtccaacaacggtgccatcgattattcagccaacttcggccaccgcaaaccagcccgttattttcgtaccggggagtaatggaacagttgaagggtttaatggcacctttgctaaattgaaccgtcaagccacacgccatgttttaaaagtaacggtattaaaaaatggtcacttgaaaaccagtggtcgctttgatcaaaaaacacaacaccccgtgattgtggttgcgtttgaaaacaatgcagatggtgatgagaacgtctttaaacaatccgaatggtttaaattggcagcaggtaaattagctaaacaataccactttacgcattttggtggggttggttattccaacggtgggcttgtattaacgcggtatgctgagcgtagtggaagtggaccgaagattacgcgattactgacgttgggaacgccatataatggcatgtcggagcacatcactcaggaaacaccgatgttagctgatttaaagagccgccggcaacatttatccaaagacttagtggtctattcagtcggcggcacaattaacgataagaatgatgggattgtcccagcagcgagtgttgcggctggtcggctcatttttcaaaagcaagttgctgattatatgacaatttcggtgagccagcaccatgcagcccatactgaattgccggataatccaaccgtcatttcactgattcaacaattgatgtttaaataaaaaaaggtgtgtcgcagcaagttgagctgtgacacacctttttaatactattgatcgattgttttcaagagattccgcgtgatgagcattcccatgatgaagattaaaatttctgttaatgggacactcacccaaacaccggttaatccgaagaggctagaaagaaccaagacgctcgcaatcaaaacgatgtagccccgcatgatggccacgaaaaatgacaatcgaggttgcgcaatggcggtcatgaataagttattgacgatgttcatgcttgagaagaaaaaactaatgaaaatcaagggaatgccagcagacgcgtagcgaatcagttgttggttgtgttcatggttaaaaatttcgatgatcggtaatttaagaccaatcaaaacgagatataatcctaccgcaatcccgagtgcggaaagcaaaccgattttgagactcgttttgacattatcccaatgatgtttcccaaattcgcgactaacgattggctgaaccccgactgcaacaccgttgaatagggatagaccaactagtaagatgttggcgataatgccgtaagcggcgacggcatagttattactgagatggagaataacgatgttaaagacgaaaatgctgaccccagtactcatttcagttaagaaagatggaaacccgagttgaattgctttgaacgtcggttcaaaacgtaaggttaagtgctgcaaagttagtaaccgttgtgggtgatgccggtgttgtgtcaaaatcagtaggctaacgattggcgaacaaatcgtggccatcgcagcacccatcatgcccatgtgtagggggaacattaagaggtaatcgaagataatgacgaataagctttgtgaaagtgtcgcaatcattgtcaaatgtggattactatcgttacgtacgaaacttaagactaagttattgatgataaataagggactgccaattaaaataattcgtaaataggtcaagcttggggcgagcgtttcatgattggcacccagtaagtggagtagtgggtgaataaaaattaagccgagcgccatgatgatgaggcctaataaaatcccaaaagaaagaacttgagtgaaaatcgagcgactcttttcgggatgcttgctcttgttaattgagaaaatcgtggcgcccccaatcccgagcatcagacctaaaccgttaaataagttaaaaatgggcagatcaatattcaaagcggccaagccaattggtccgactgcgtaagcgataaaatatgtgtccgctaaaatatagatggataagcctaacgagctgaaaacgtcacggatgatgtagcccgttaattcttttttgatatgtggtgagttttccaaaataacactcctattcgattggtagtggggtcgccattaataacgcaataaatgattggattggtgctggtaaattcttccgggcgacaaggtagaattggcgttgatattgttgggacaatggtcgatagggaatttctgggtaatcaagtaaggctgcgctagaaactaatgattggccgataccctgtcttaatagttggataatcatcgcattgcttttgatggtcatcacgttttcgagtggtaaattattttcttttacgtaattcatcgtgtagtgatagacgccagaaccctgttcacgaagtaaccaaggttcattcgggcgacctgctaggaccagttgatcggtctgtagtggcgtccgaatcaagtctttttcggttaatggtttttcaatgaaaccaaagtctagtttgtgctgcgtcaattcttgaacaatctgcgatgagttgagtgtactgatatctaaggcgagtgtttcaagggctggccgatgcgctttaagcagggttggcaataagtaggttgcagtggtgtgcgaggcgccaattcggcacggtgtttttggctggccatcttgatgatggagtgcgtgcaaatcttggtcccataaatcaagaagttgttgtgcttgttggtagaagagatcagcactcttagtcggcgtcatctgctggcgcccattgcgttcaaatagtgtgacccccagcgcatcttccaattgtttaatttgcacagaaacggtcggctgcgatagaaaaagcagttgcgcagccgttgtaaaattcttggtttcataaacggttttaaaagttgttaaaattttaaacatatcatcacttctattcgttatcttaataaaaactattataaagatttattttattaattgaaagagtttcggtatagtttaagataacaagtgagaaggagtaaagcaatggacaatataacaaaaaaaatacctggctttgcgttatcgttagcgattgcgattgccagttattacatcgctaaattatggttaccaatgttaggcggcgcaacgattgcgctttttgtcggcatcgtacttggcaatacttggttgcaacaaccggtattagcagccggaactaagttttccgagaaaaaattattggaatattcagtcatgttactgggtgcgacaattacattccaaagtattcaacaaatcggctggcatggtgtgctgtttaccgtgttacaaatgagttgtacgattggatttgccatctggtttggccgccggttgcaatttagcgaaggtacctatttattgatggccggtgggaatgccgtttgtggctcgagtgcgattggggcaattgcgcccgtcatcgatgccgataacgaagataccggcattgcgattacattggtaaatctaatggggaccatcttgatgttactcttgccagttattggaacgttgatgtggggacataataatgaactccgtggcgtgttaattggtggaacagtgcagtcagttggtcaagtggttgccagtgcgacgatgattaaccaaggaacggttgtcacagcgaccttattcaaaattttacggatcatctgtttggtttttgttgtcagcggttttggttacttacatcaaaagaaacaaagtaaagtcagtgatacaaaactgagcgaacaattattagcgaagaagagtagcttagtgccatggtacgtgattggcttcctattattctgtgtcttaaatagcttacgggtttttccaagccaatttggtacactgtgccatttcttgagtacatggtgtgaaacaacggcgttagcagccattgggttacgcttgaacttaaaggcactcttcagccaaggtaaacgtttattagcatatgccggcggattagtgaccgtacaggtagtcctcgcgattttattaattacactattattctagggcgtgtcagcagctaggatgtttctaggaatattgaattattaaaaaatctgccatcaacaattttgttgatggcagatttttttgttattaagcttggtaagtgccgacttgaacggcttgttttaaagtggctggtgtgtgatgtgacttggcgaaaaattcgcttaaatcacgtccggctgttaaacctttaaaatgtttgccgccttgccaaggggcgattgcggaaaggtcataaacgacgccatcaacggcaacgtatgcgggttgaccatcttgaccgttatattgagcgagtgtttcttttgtaaagactttatctgtcatgattaaaaatctccttcgaattgtgaatgggttaccaataatatagcgctagatgcagaagttggcaacgattaagttgtgcactttgaaaatgaataatgttgaggctagcgaattagagaattattcgtgaccttaaatactgttcttcaaataataatttgttaaaataatcataattgggggggatgaaaatggacaataaaaaagactggttgatgcgacaagttgattcttttgcggaaggaatgggttatttgttatcgaaacaaagtggtaattcacagtcggaggttgtctttccacaagaaaatgctaaaaaattgccttttcaaagggaattggcaagtttaattgctgccaacgatactagaggggccgcccaacgattattaaaattacaatacgcaatgcctgaagaacaatttctacagttaggtacatggttattattagaaatgaagcaggacagttttcctaatcctttaacccgtgaagcgctgacagacgttttaaatacgattaattaaataattgaacgaaaaaaccaccctaataaataatagggtggttttatttaatattgatggacccgaccagattcgaactggcgacctcctacatgcgaagcaggcgctctcccaactgagctacgggcccaaacgcttacaaaaatattttagcacttttagctaaaatagcaaggcgaattagtgacgggcagatgttctgaggttatttgcttttttgccacctttaatcgtgcgggttttgaagtgggcttgttggctatcaggaacgaacttgaagtgttgcattttcccggcatatggttggccactgaggcgaatcttcaaccaatcttgcatggcttcaatcattccagtcagtttttcggcttgttcagaatttgcttgtttttggacttcggttgtaacatcgttagtgagataagccaataatttttgatgataggcaattagttcttctgtgagtggcgcttggttatattgattgaaaagtttttgaacaaaacgcattgcatctttagcgttttgtggttggtaaaagcgatcttgatcagacatagaatttccctctttcttcagagtagtataacgaataatagtgctcgtcacaaccgtgtgctttggtataatagagaaatactagtttttcggaggtcagcaatgtttaaacgtaaaagtgattggttcttagtggctgcactggtgatgatggcgatcttattttacagttcttcaatgacgtatcatgaacaaacatcggtgcccactttggaacgatttctcaagaatgaaccacttaaggcttggttaagtcaattttcgttccattatgcaggcagtgaacagagtgtaaaagcatctgggtatttcaaatttgtggagtttttcgtgcgaaaaggcgcccattttgggacgtatttcttattggcggcttttagttatttagggctacggccacgcgtaaccggtggttttttagcagttatctttagttggctggcagcaaccgggtatgcggccacggacgaatttcaccaaatgttgactggtgatcggacgccactttttcaagatgtgatgttggacagtgttggcgcattaacggggattgtgattgtttgcgcactacagtggatttttacacaaaaaaagagacgatagcccgactatcattgcttttagcatggtaatttgctatcatagaaaacgacttagtaccagaattctataatcgaaaagaggagttagatatgtcaggacattcaaaatggcataatattcagggtcgtaaaaacgcacaagatgcaaaacgcggcaagattttccaaaaactatcccgtgagcttttcatggctgcgagaagtggcggtcctgacccaagttctaacgccgcattacgtttaattatggataaagcacgttcagctaacatgcctaaagataatatcaaacgggcaattgataaagctgacggtagcgatggcgcgaactacgatgaaattacttatgaaggctatgcaccaggtggtgttgccgttttagtacacgctttaactgacaataagaaccggacaagttcagacgttcgtgttgcatttactcgtaatggcgggacaatgggtgcttctggctcagttgcttacatgtttgatcgtcgtggttacattgcgattgcacgtgaaggcttagatgttgatgaagatcaaatgtttgaagacattctagaagctggcgcggatgatttacaaactgaagaagacgtgtttgaaatttacacagatcctaaggaattagcaaatgtccgtgatattcttgaaaagaaatacacattggcaaatgctgaattaacaatgattccacaaaatacaacaccggttgatcctgaaaaagcagaacaattccaacgtttaattgatgctttggaagacaacgatgatgttcaagaagtttatacagctggcgaactaccagaagaagactaatttgtttgataagtgcgttgcaagtaattgcaacgcactttttttgtgcagaaaattatccggttatttgcgtatctttggttagtcaggaaggagggacgagatgaccgaagtattaacaacccttttgcaaaagtgcgcaacggaaaaagcgcaggatctttattttcgaccactatcgacgggttgggcaattattgaacgcttagcgacaggactaaagccgttacaaaaagttactctgtcagaaggcaatcaatggctcaatcaaatgaagtatcaagcggggatggatatcagtgaaactcggcgtccacagaccggccgttcagcgatcgaggtggcaggcgaattgatttatttacggttggcaaccgtgggggattttttgaatcgggaaagtttagttgttcgtttcatttatcccattgggcagacttatcattgcgacgactcgcagattttaagtcgtttaatgcagttaattcagcaaccaggattattgctatttgccggtccaactggttcagggaagacaacaagtttgtactatcttgcggaacaagtcatgcaagataagatggtggttgcgattgaagatccgatagagattcaacagccagcgttcttacagttacaggtgaatgaagccgcagggttaacctatgcagcattgttgaaaatcagtttgcgattacggcctgataccttaattattggtgagattcgcgacttacagacggcccaacacgcggtttctgcggcgttgagcggtcacttggtactaagtacgattcacgcgcgaagtacaacgggggtgatggaccgtctattagatcttggaattagccactcacaattaaccgcttgtttagcgggtgttgcctatcaatcactagtggtcgaaggccacaatgtagcggcccactatgagttagcaactgcacaacagttggaggaggctgttcatgaagactaaaaccactgttcaattcaatactgaatttatgttgctgttagggcgcttactgcaaaatggtttttctttacaacaagcacttgagttcatgccgattgtttttccgacacaaaagcagtggctgcatcaggtgcaaactgggttagaagcaggaaaacgactagcaccaagcttagcggcggtttcgtttccaacacaccttgttgcacagattgaattgactgagttgcagggaaacttaggcgagtgtttgttacatcttggccaattacagcgaattcaacagaaacggcgtagagagttagttggcgtaattgcctatccctgttttctactcctttttctcggggcgttgattgggatgatgcagatttatctttttccggaaatcgcgcagtttaacccaacaacttcggcgacatcaccattacaactattttttagagtgatggggacattcgttattatggctggtggtctgattagtgtgtatttattccgttggcatcggcgaccgctattacaacgattggcggcggcatttagatggcccttcatcggtaaaacgttgcaggcttactatcagtattgcttattatttgatttagcgacttgcctgaataacggcttaaacttggccgaaatgcatcagcttacacatcgtttggcgaaaacatcgtggcttgtacaattaatgcaacaacttgaaacggctgtccaaaaggggggcacgctattagcgaacttagcggatggcgttttttatccacctgaactgcaattagtgctcgctaagggaagtccgttacaacagatggccaaggaggttgatctgcttgcagtcattaaatacgatgaactgcaacggcaattgaaacagaaggtgaattggctacaaccgctcttgtttatcctaattgggatcatcattatttgtacctatctcagtattttattaccgctatatcatacaatggagggaatttcatgaagaagaaaagaaatgcatttacattgatcgaaatggtcgttgtgctagctgtgatagcaatgttagtcttgttaattgcacctaatttaatgcatcagaaagagacagctgagcaaaaaacggatacggctctagtggcaacgattcaaacacaagttgaattagctgaggatgacggtaaaacggtgtcgagtctagccgatttagcatcaggtgaaaaatatttaaccaataatcaggttaaacaagctgaaaaacgcggcataacaattaaggataataaagttgttcaaaatacaaaataaggcgttcactttaatcgagagctgtcttgttttgttcattgttggagtagtcagtttatttgcgttgcaacatattcgagattatcgtgcacggcaggcggagcgtttattttttgaacaatttgaagcgtcttggcatgcgactcgcgaatatgtcgctgttgagccgcataatgtgcacttatcttgggatcaaaccaaccacacgttgcattacacaagtgcggatccacaataccaaagtatggatatcccgattccagaaacattgatgtgcgtcgatccagaaacatggtttaggattcaatttaatcatgactcagctgctagaccgcggtcattgatttgtcggtctaaaattgatgggcaccgttatgaatatcgggtccagatgatgtgggggatgttacatgttaagaagtagaccggcatttctattaatagaacaaatcgtggcgttaagtcttctcctgatgggaggcttgaccttgacaatgagtctacggcagtttaaagcacatcaagttcaacggcggtgtgctactacagaatatgctgtaatggcaatggctgccaatcgattggcaaatgagcagccgccacaagcacaatggcagttgcaacgggaaacataccaagtcgtcaccaaaaaacaggccatttatgtcacaaataaagcgggtgagcgagttgcacttcaatggtattgttactaaacgctctggatttacactgattgaaatggttgtagctctcgttattctgatattgagcagtcaattaatattggcaaccactaaaacactaacgcacacaacgcaattaacccagatggaacgtcagaatattaattggcacattagtatgattgaacttgatcgttttctggatgacgctcaatttatttcaattgaacaggcgaattatgaacagcaattaaccgtcgctaaagattcgaaacgacgctataccttaacgaaaactaagaaggaactggtggtttcgagtacgaagaatggttatatgcctctgtttgatggggtctcgcggttaaaaatggtgtatcatgaaccttttttagaactcgaagcgcgcttaagcgatgggacagcctatcaacatgaatgttttttggaggcgcaacatgacacgaaaaatacagattaaacgctctgcagtcgcgctcttgaatgcagttttgatgttgagcttggtgacaagtgcgttgttgattgtgacccacagttaccaacagcaacaacagagttacgtcagtttgactaactattaccaaacgcaaatcttgcttaaattaacaaataaagcgcggcaaactcagtcaattcaaggtataaagactaacatcggtaagagtcgtatcgaccagcaacacaagttaatcatcattgagttaaacaatggttatcgaaaacagtttccagatcagaatgaaacagatcaaggataaattttctatttgataaagcgcttactatgatttataattctaggtatacccacctgtattacttgctttgccgttagaataccgatagaatataacaggaatctaatgaatagaggtggctattttgcctaagagtgctgtagaaacgttgtttgatcaactcgatcaaacaacacaattaattgaaaagaatttagaaacaacctatttggatgcactcaccgagaccattgctaatattgcagatggtggccgcgtaaaggttgaagacggcttaccagatgctgccactgttgcacaactagaaccgctttatgcggcggttaatctcaaccaatttgaagcagaagaaattcgccaagcattacagttggcaacgctcaagggtttgcgtcaagttaaagtggaaccaaacaagcaaatgacaccagatgcgatcggctatcttgtagcttatttggcagaggtttttggtggtgctgaccaaatcaagacaattttggacccagttgttggaacggggaacttattggcaaccgtaatcaatcatatccaaaaactaacggggaataccgtgcaaggttttggggttgataatgatgatagtttgttggaaattgcgggcatcagtagtgaattgcagaagcattcaacaacctttttccatcaggatgcgattgaaccgctactggttaaaccagttgatatcgccgttgcggatctaccaattggtttttatccattagatgaacgggcggctgattttgaaacccacgctgccagtggtcattcatatgcacatcacttgttgattgaacaaacgatgcattatgtgaaagaaggcggctatggctttttcctagtaccaaatgtgattttggaaacggatgaagctaagcaactgattaaatgggtgacaaaacatgtctatttgcaaggcttattgagtttaccagcaaacttgtttaagactaaggaaggtcaaaaagcaattttagtccttcaaaaacaaggtgccggggctaaacaagtggaccaaattttattaggtgaatttccaaattctaacgatcaaaaggcgtttgcaacgtatctacagaagatccggacttggcataaagataatttacaataatcgaatagaaaaggtgattagatgtcaaaagtattagcaattaacgctggtagttctacccttaaatggaagttatttatcatgcctgaagaacaagttgtcgcacaagggatggttgatcgtttaggattatccgattcagtctttaccgttaaatacggggatggtcaaaaattctcaatgacccaggatattaagacgcaagatgttgcggttgatttgttattgaagaagttaatcgaatttaaaatcatcaatgaatatagtgaaattagtgggattggtcatcgggtcgttgccggtggggaagactttaagtcatccgcattaattgatgaagcgtcattaaaacggattgaagaattgtcagaatacgcaccattacacaatcctgctgaagcaggtgttatccgtgctttccgcaagattttacatgatgtaccacaggttgctgtttttgatacatctttccatacaacgatgcctgaagaaaattatctttacagtttgccgttggaatattatcacaagtatggagcacgaaaatacggtgcccacgggactagtcatcggtatgtttcccaccgtgctgctgaaatgttaggcaaaccattggaagaattaaagatgattaccatgcatcttggtagtggtgtttcagtgactgctattaaagacggtaaatcgttggatacatccatgggctttacaccacttgcaggggtgacaatgagtacgcgttcaggggacattgacgcatcactcgttgcatttttaatggaaaaattaaacattaaagatccagcagaaatgatcgatattttgaatactaaatcaggtatttatgggatttctggattatctcctgatatgcgcgatcttgaaaaaacgcgtgaagaacgtccagaatcacaattggcaattgatatcttcgtcaatcgtttaatcaagtatgttggttcatacgttgccattatgggtggtcttgatgtcctagtgattacagccggaatgggtgaaggtgacatcttaatgcgccaacgcatcgccgatcgcttgagtttctttggcgttaaagttgatccagaacgcaataacgtgatggctcaagaacgcgtcatcagcgctgacgattctcgcgttaaagtattattagtaccaactaatgaagaagtaatgattgccagagacgttgttgaaattggccacgtctaaggcatcagtgaaaatgaccagcgcatggctggtcattttttagtggagggaatgggaatatgacaggttttacattattttatggcttattggcaattgccttgctcattatctggctgattgttgaaacgaaaatggtttggcgtgcaaaacggaatcgactatggacgatttttttatgttgtgctggaatcctcttactaggtttaacgttagtgatgggcagaacgctcagcgatcaaatcacaggtatcggctctgttgtaattttaattgtgattgctttttggcctcgtggtttaaccaaaacaagtttgattgcaaacttaaatactattcatcaatttgcagcgatttctaagattgaattactaacacaaggtgacttagtcgaagcttgtttttatgtcggtgaaattcggattgccaagttgcgctttaaaacgacggtagaaaaattacaaacctttttaaaagaccggtttcctaagaaacgcttagtggtgaaatagggttaaagtctttcatattactggctgatatgctaaactagtatttgcatatcggggccgttacggattcgacatgtgtaggtgagcgtgagttgcacttcgtaggttacgtctacgttaacaacgttacagttaattataactgcaaacaataacaattcttacgctgtagctgcctaaacaccagcatagcgtgatccgcctgacttcacccaagggttagatccgggtctcaaattaattgggttacgttaaacgctgccgtttgaggtgtttaaaagagatttgcaaactagctagttcatccgagcttctgtcggacggcgttttggactagcgaactcctaaatcgttcgactatgagtgtagagattgacgtggcaatgcgcatggacgcgggttcaacccccgccggctccattagataacaaggtgttaagcagaattaggcgcttaacaaaaggcgattaacactaccgtaacggtgttaatcgccttttttgtttgcaaaaaaataacagccacacgtgtgactgttacattaattgcttatgcccaacggtttgtttttgttggtaagagcattaggatatagaaccaaattgtcccgataagcggtatgaattcaatgagtacccaccagcctgagcggtctgtatcgtgaagtcggcgcattttaacggataaagttgcaatccaaacaatgaagacgacgatgttacgacccattgagatgcctaaatccccaatattatagatttctgaaattggatggccggttattgtttgaataataccgatgataataccacctagaatgtagttaatgatgattggccaccagaaatcaggtcggtttgaagtgcctgagaaatcaaaaatccgggaccaaaaactttgatatgatttaaccatgatgtaaaacccccttctccttatcagcttttcgcatcgtcagttctggacgagatgagaagttatgataaatttaataacttcctaccaaagatattatgacatacttaaacgagttttttacagtttttagcttacatagagaatcaataatttattcgccaacgcccattaatgaagcaagaatgaataataaccaaatgtgaattgggtagaacaagtagaagaaatacttcatgctacgtcctttttgtccgttgtacaagaggattgggataatcgcgaagatcatcatccattgcgtattgctagtgaagagtccagtgaaggcaaatccggagttgattccagcgtcaaggaatgcgaaaacaagaacggtaagacattgtaagagccggttgtttcggaaaagataaaaaaatactcctatgtagaggagaaggccattttccgcaagcataatggttggaataaccattgcgagattggcagcaaacatcattgtcttagggttagcaattagaccaagcgccaataatgataagaggataggagcaataattgccagtccaccaagcaaaatttgtttggaatggtgcgtgcggcgaccgacactaatttcttgaatcccatacattgctaaaacggcaatgtataaatcggtaaaaatattgtttgacagtgcgaggttaccgacttcgaagaagtgttggacaatggggcttcccaagttcataatccaaaaaccaacgagtaattggaacatgtaacgtttttgattccgcgtatgtatgaatccttcaactgccataaagaagaagatggtggcaactggtcgtccgaaccaatcaacccagccagggaccccagccccggcgaacatttggtgcacgtgatcaataaacatgaggataattccaattaccttgacgtcgaagttatttaaaacttgatatgatttagtctgcataatagcctccctaaaagttaagtaagtacattatcgtatgtttagctcatattattaagttttaaatggctagtgacaataatgttagatagcaaaaaccacgataaaaggaatttatcgtggttctgagcttatttagcaatttggcttgtgccatctgcgtaatttaatgtaacgccgtcttggacgttaaaaatgtaagtgttaaattgaatgctgttatccccgacggattggccttccatttgaacgccgcgggctagcagctcattatcgttaaaaataggtgtgacacggtaacgaacaaaacgattagggtgttttttgagataataagcaatatctgattcatgggccagcatttcgggtgcgtttagctggcgtgttcctgtcatcagattctttggattattattttcaccggttagttgatagccaattaaatgactccgattatacagccagccagatttaatccgcttattatgccaaccggtcggattccaagtgagtccttcgcgcttggcagtaggcatcatcgattgatttaaaagaacatttgcagcaccaacgcgatttagtgcgtcgagattactaaaggtttgccaaccaccgtgatcggtagccaaatcagtagcactgaagcttggttggttattattgacgagtacctcgttttcaccacggtaggtgagggccgcgagctctgatgtgttatgacgctcaggaccagtcgtttgcatttgttgctgatagttagtgagttttttgtttaactggttaattttacgttgaagcgcattaatttgacgttcggtttttttgttgtgcgcattaatgcgcttggtttcttgacgtaaggtggtagcgtgaacggtagttggttgttgcaaaagggttccgacaccagcaagtgaaattgttaccaccacgcgacttatcaaacgggttgctttcattggctaatcctcccatccgcaaagggtatagccttctgcttgtgcttgtgacaatggcatggttgtagtactgttggcacgacttaagccacggcaattgggatcaagatggtattttttaccagaattaggggcaattgtcaccatttgttcaacttgttgagcactagcagcttgttgtgcttgttggcttgcctgaattgcagcctgttgctgagcggcctcgctagcttgactagtagcggcgattgaggctgaagccgcacggactctttctgactcagacgctttttgctgctttttaacaagtcgtgattgactggcaacttgttttgtcagttggctagcctctgttttctttgtagctagttgtttttttaaagcgctcgagttagcacgggccgccttgttttcgcgtacatcaacttgatgttggctggtcttcttggaattcgcagcagccaccggcattaatgaaccgcctaagccgattaaggcgatgatgataatcagtacgcgacgccattttctgggtcgttgccggttaaagaatagtagtgaaatcagtgcgctccccaagaacgctaaaaataaataggacataataacctccaaagtaatgaataacagttcttaacgattgtatattgtacataatatgaaagcaattataaaaagcctaggcgtacctaggcttttagcggttaatctttagttgtgagtgaaacaattgcttttgtttgatagtatttttcaggattggtttcaaaagttaaccaatctgcatcagcgaatagaccagccaatgcaagaattgggcgttctttagcgagttgttgttcgctagaagttgcaatggcgtcttggtagctaccattgaagatttcatctagataaaaggcttgatcatcaccaacgtttaaataggtagtatcattcttccaagcatgtagcaaatccatttccgaaaaagtaacggtttcgttatttgaaaaagtcatgataaattgcatatgggtcaactccaatcaattaattaagcaacaatctatttggttgcctgcctaaattatagcatttagataataaaaggcgaaccttttgacagtcattgtggttaaaaagtagaatgaaggtgaacaaaatagaaaggaagtcattgatatggcaaacgaagaacgattagatagtttgaaaaatgtaattgaaggcacagttaagaaggttgtcagtgaagtgacacctaataaagataagaaagaaaaggcgcaaaaagctgacaaaaaataggacttagtaatgaagtaaaggtcaaaatcatccgtttggttttggcttttttattggaaagccgttaaatgcgttcgcttttacgaggcaggcttggtataatttaaaggatagtcagaggaagtaggtacaattaatggattacgcaggaatgttagaccggcaaaagcacattcgtaatttttcgatcatcgcgcatattgatcatggtaaatcaacattagctgatcggattctcgagatgacggatactattgccaagcgcgatatgcaagcgcaagtcttagatgacatggaattagaacgtgaacgtgggattaccatcaagttaaacgcggtggaattacactaccatgccaaagatggcgaaacttatattttccatttaatcgatacacctggacacgtcgatttttcatacgaagtgtcacgaagtttggcagcttgcgaaggcgccttattagtcgtcgatgcggcccaaggggttgaagcacaaacgttagccaacgtttatttagcggtcgacgatgatttagaaatcgtccctgtcattaataaaatcgatttaccatctgcacaaccagacgttgttaaagcagaaatcgaagagatgattggtttggatgcttcagaagccgtgcttgctagtgctaagagcgggattgggattgaagaaatcctagaaaaactggtaacggacgtgccagcaccaacgggtgatttaaaagcaccattgaaggcgctgatttttgattcgatctacgatagttatcggggtgttgtgttaaacgtgcgggtttttgatggcactgttaaagtcggcgataagattcgcttgatgaataacgggaaagaattcgaagtcactgaagtcggtgtgatgtcgcctaaagccgttaaacgcgacttcttaatggttggtgatgtgggttatattacggccagcatcaagaccattcaagatacgcgggttggggatacggtcacccttgctgacaatccggcagcagaagcccttgatggttatcggcatattcaaccaatggtttattctgggatgtatcccgtggataacgcgaagtttaacgacttgcgtgaagcccttgaaaaattacaattaaatgatgccgcgttggaattcgaacctgaatcgtcacaagcattgggctttgggttccgttgtggcttcttaggcctcttgcatatggatgtcgtacaagaacggcttgaacgggaattcaatcttgacctgatcatgaccgcaccatcagtggattatcatgtcgatttaaccgacggcacagaagaagtgattgataacccatcagaaatgccagaaacatcaaatatttcagaagttaaagaaccgtacgttaaagcatctatcatggtaccgaacgattatgtgggggctgtgatggaacttgcacaacgtaaacgcggcgaattcgtcacgatggattacttagatacctatcgggttaatgtcatctacaacatgccactgtctgaaatcattttcgatttcttcgatgacttgaagtccaataccaagggttatgcctcattcgattatgaagtgactggctatcgtgcgagtgatctggtgaagatggatattctattgaacggtgaatccgttgatgccttgagttttatcgtgcaccgtgactttgcctttgaacgaggcaaagcgattgttggtaagttgaaagaaaccattccacgtcaacaattcgaagtgccgattcaagcagctatcgggaataaagtgattgcccgttcaacagtcaaggcctaccggaaaaacgtgctcgccaagtgttatggtggggatattacccggaagcgtaagttgttagaaaaacaaaaagccggtaagaaacggatgaaatccgtgggttcggtggaagtcccacaagaggcgttcatgtccattttgaagatgaatgatgaagataaagccggtaaataaggattcttaaaaatttaatagtgataaaatagcagttttgccaacattttgccaacgtcaattttcgttggttggcaaaactgctatttttttgtgtttcgaattattcaagatagtgctcttgccaacattactcgttctgaatttgttcgatcagactaactgtatttttgcgcattttatgagtgacatgagaataagtgtccattgtagtgctgattcgagaatggcctaaacgttcactaacgactttcattttttctccggcttctagcagcatagtagcgtgagtgtgacgtagtgaatggaaattaaaattcttatgcaatttgtcttggactaattgcgccttatatttaatcgagttaggaaggacgggggtaccattttcttcggtgcacacaaagttacaatgagaatttacggttgaaagctgaggttgaacagcggaagaataataagtactggttgtgggcattagtgccaattgtcgcgattcttgctggcaacatgacctcattttcacggatgttcatgcatttttgtagatagttcacgatagattgcatagaaataggcgttaagcagattatgaaaactgcttaacgcctattttttattggcgactgtgacggtagccgtaactgaagtaaattgttaggccaatcaccaaccagattaagaagacaatccaagttgttagttgtaactgggtcatgagtagtaagcataagccgcatgaaagtaaaggaatccatgggaatagtggcactttaaacccttgtggcaattcattataaaatggtaacttgcgcaggaagatcacaccgagagaaacagttgcaaaggcgaataacgtgccaatgttgaccaattcagcaatcttatcaagtggcactaccattgcgacgatgcttgtgacgatggcgaaaatccatgtattcgcaactggcacatgtgtttttgaactgactttggcaaaaacgggtggcaatagcccatcgcgactaatggcgaagatcagacgtgttccgccgtaggtcataacgagtaggacagttgtcataccggcaactgctcccagggcaacaatcccagcaacccagttttgatgcatcaattgaagcgcaaaagcaacggggtcaccaacgttgagttttgtatagtgcacgacgccaacgaggacggtggcaactgcggcatacaataatgaagcaatcaataatgaagcgataatcccgattggcatatcacgttgcggattgacaacttcttctgatgcggttgaaacggcatcaaagccgatgtaggcgtaaaatgctaatgctgccccagaaagaatgccaccagcaccaaatggtaagaacggtttgaagttggctggtttcacatagaaaatggcaacgccaaggaaaattacgatgacagcgactttcacaccaaccataatcgtattaatccgtgttgattcgcgtaagccatttgatagtaagaacccaatcaataacgtaattaaaccggcaattaaattaataccaccagggtggccaggcgtccatgcagtcgataagaaggtaggtaagtgtaatccaaagccagcaattagattttggaagtaggctgaccaactgacggccactgaggcgactgcgaagagatattcggaaataagtgcccaacctagaatccacgcgattaattcaccgaagacggtgtagacgtatgtgtaggcactaccggccaagggaattgtagaagcgaattctgaataacaaagggcagccattgcacagacgactgcggcgagcaggtaagacagcatcgcaccgggtccagcatatttagcggcgataatccctggtgtgataaaaataccggcgccgacgactgcaccaacccccatggcggttaaaccaaaggcggttaaatggcgttctagtgtactgtttttaaattggttcacgtcgatttgttttttggcaaagagtgaatgttgtgtcattagtaactcctttttaagtgagatggttctaattttaatcggtctactgagaagtgtcaagataaaaaaagcgccatgacagtgattgagccgtcatggcgcggattagttaagtgattaaattaagccccagtggcgtaaaccttcaataatgccaccttcagtattcttagaagtaatgtatttagccttggctttagcttccggaataccattgcccataacggtgggatagtctacgaagtcgagcattggtaagtcgtttgtaccatcgccaaacgcataagttgggatgtccgttaagttttgtgagcgaatcaattctttaataccggtttgttttgaacaatctttttcaaccgtatcaattgagttcggtgtgttgcggtagaatgttaagtcggtacttagtgtttctgtataggccttgtcattgtcgtttgttagaatcaacatcatgtagactggatgattcaagtaatagtctggatcaacttcggggacgggggcgttgacaaacttgtaggcatctttgccgggttgagttacagccgtaatccggattgcttcttcattataaaaagcgatggcttcgtcagcagcattagcaattgcgacggttttttcaatcacgggcgttggaatagtgcctttataaacaggttgaccttcatattgaatgaagctcccatttaaacaaatgaatgaatcgatgccggtttttgcaagtgcatcttgaatttcaagcggtgagcgaccggtcgcaatgattggtaggtagttgttggcgcgtaattggtggagtgcaatcgcaacagctgcatctacttcagaatgttcgttgtaaagtgtaccgtcaaggtcgaaaaatactagtcctttataagtcaaaatggggcctcctaaataatgatatctgcttaacatgctatcatgcttagcgataccatgcaaacgggaaccgtgatgcgtttgattttcatcacttcttcatatattattcatccgtaattggtttatctactgtataatatagacatagcaacgtaaaaagagaaggaattctaatgaaaattttaatggtagaagataacaaatccgtatcagaaatgatgagtatgtttttccaaaaagaagcttgggatgcccatttcgcttacgacggcaatgaagcagtggaagcctttagtgtcgatccagagagttgggacattatcacgcttgatttaaatttaccgggtttagacggaatgcaagtcgcccaaaaaatccgcgagttgtcgaagacagtaccaattattatgttgacggcgcgcgattctgaaagtgatcaagtgcttggccttgaactcggtgctgatgattatgtgacaaaaccctttagtccaatcacactgattgcacggattaaagccttacatcgccgtgctgagttgattgatgaacaagtcgaagcagctgaagaaaacttacaacaagcggctgaaaattcagattttgatgtacaaacaacacactttaagttgagttctaaaacgcgtgagacttatttattggacaaaccaattttagatttaacgccaaaagaattcgatttattgaagacgttagctaaaaatccccgtcaagttttctcacgggaacaattattagaacttgtgtgggattaccaatacttcggtgacgaacgaacagttgatgcgcatatcaagaagttacgtcaaaagattgaaaaagtaggaccacaagtgattcagaccgtttggggtgtcggttataaatttgatgattcagacgcagcgcgcgaatgaagcttatttatcaatggatgttggcatttttcggcgtcattatgacgaccattattattgtggggattgcgtttacgcaatattcgacaaggaccgcttatgagagcacctgggatcaactagaaggttacgcggatgtgattgaacgtgaagctttcaaacaggggtctcaagcggccttgtcgacccaattcattattgatagtcaacaaatcctttcccaacaacacgttgggtttaatttctttaacgccgaaaacgagatggtgtatcctaccccggatcctaaagtttcggtcaagaaacaatattggaaacatttaaagaatggccagattcaacggctgagcttaagtcgtgattcgcaccaagtgaataacaataagcaagaacagttagtggtcttcaaacccgttttttacaataacaaactgatttacgtgattggggtggcagcaccactacaaaccgttaaatctggtttgacaacgatgcgcaagaacctcttgattgcctttttactatcgacaatcggtgggattctgttgagttacgtcttagcacggtatcaaatttatcggattaatcgcttacgaaatgcgacccacctagttgctgaaggagattttaatgttcagattaagaatcctggtaaagatgaattggatgatttggccaccgattttaatgagatggtgcattcgttgaatgaatctgaagaggaaattaagcggcaagaagatcgccggcggcaattcatggccgacgctgctcacgaaatgcggacgcctttaacgaccgttaagggtctgttagaagggttgcaatatgatgcgattccagaagagatgcgcgccaagagtatttcattaatgcaaaatgaaaccaaccgactcattcgcttagtcaacgagaacctggattatgaaaagattcggactaaccaaattaaattgaacccgcaaacgtttaatgcggtggaagctatccagaatattcaagagcaactcgagaagaaggcgactgaagccggtgatacgctcatcttggacgcccaagagaatgtcccaatctatgccgactatgaccgttttgtccaagtgatgtttaacatcatgcaaaatgccattcagtttacagaaaatgggcaaattacggtgactgcggaagctggtttccacgaaacaatcttaacgattagcgataccggtatcggaatgacggacgaacaagtcaaaaatatttgggaacggtattacaaagcagatccatcacgtaagaataccaaatatggtgaatctggtttagggttggcgattgtccaccaactcgtccagttacattatgggacgattgaggtccaaagtattcctgaacaagggaccacttttaccttaactttcccagatgaaacgattgtgacaagtgaaagctaaaccaatttaaataggcgtcacgacaaggattaaattgtcgtgacgcctattttttagattaaatatgcaattgcgtttgagctggttgggtttcactgatgatttcgccagcgtgcattgagagggtaacagcggcgcgcttgttgagagcctcgtagaagttgtcgctatccattagaatcaggtgggcgggtttacccacttcgagaccatattggtcaaggacgtgcattgcacgagcaccattgtaagtaatgaagcgataggcattcatgatttcagtatggcccatgatttgggttgccagtaggccactatacaacacatcaagcatgttgccatcgcccattgggtaccatggatcttgaatatcatcttcaccaaaagcgacgtttagcccgttggcagtcagttcttttacgcgcgtcaaaccacggcgcttcggataagtgtcaaaacggccaccgagaaataggttgacaagtgggttggcgatgaagtttaaatccgccatttttaacagccgcatcaatttgtacatataggcatcgttgtaacagcccatggcagttgtgtgtgaagccgtcactttgtctttcatccccgtttcaagggcgagagtcgcgactgtttcaagactacgtgaattgggatcatcaatttcatcggtatgtgcgtcgaatagtaaatcatattcttgagcgagttcaaaagcaaacttcaaggattcgacggcatattcgcgattaaattcgaaatgtggaatagcaccgattgcatcaacccctaattgggcagctttggtcattaatgctttgccatttggaaaagaaagaatcccttcttgaggaaaggctaccagttgcaacgtcatccaatccttgacttcttcgcgaacctcgattaaggctttgagcgcaactaagtctggatcagtcacgtcaacgtgtgagcggacgaattgaatcccatggctggcctgtaattttagtgcttgaattgcgcggtgtttgacgtcgtcgtgggttaaatcctttttgcgttcggaccaaatccgaatgccatcaaacaaggttccagattcattccattcaggctggccggcggtgagagttgaatcgagatggacgtgaggatcaacaaatggcggtaatgccaattgaccatgtccgtcgatgacttgctcattaggatgcggtattagctgtgcctcaattgctgtaatgatcccgttttcaattctgattgactgcaatgattcttgattctcaatgtgcacgttttgaatgagcattttatccaacctcgctttttttattagtgagtataacaatcatgagttgactttggcaagtaagtttaatacaatgcttataaatataaatccttttaagggcagtccagtgaggctgacaaaggagcggttaacaagtacattagtggacctgctctgtctaggagtaggtctttttttaatgcaattaaccaagtggagggtatcaaaatgacaaagcaacaaacaattcatgcagtatccaaggacgcacgaacgatgggcagttgggatttgttcgcaacttggattggtgcaaatgcgaataacggcacttggtttatcggcggcattattgcggcaactggcttgattcaagggtctacgttgttactagttgttggctgtttatcgtacgtcttgcttgcactggcctcctacatggggtatcaaactggtgtgggggcgatggggctaacgcgggcctcatttggcgtgaagggatccgtcttgccatcgattatcaatgtggtacaattcatcggttgggctgcggtgaatacgtatattgcagcaacttcagtgagcttcatcatcaaggaaatcatgggctggtcaggcaacgatgcagccactaaccggatgagcttgattgttgggattctaattatgtctgtcctgcatttaatcagtatttcgctcggtgaaaaatccgtccgctggattgaacgaattggcatcatcttagtgattatcttagtcacttgggaatcaatcattgtcttcaaaatggtaccgttcaaagacttattggcgtggcgaccagccagcaacttacggcttgaatttgggaaggcggtcgatatcctagcagcgtttaaccttgcatgggtaaccgctgctgcggacttcagtcgtttttcaaagaacaagaaagcagccacaggctattcattcttaggcgccaatattggcctgttctggtttgctttcatcgggttaacggcgacaattgccacagcgattacgttaaatcattttgacccgaacaacgcggatccaagcaccattgcggccaaattagggttaggtgttttagcgttattagtgatcgtgattaccagtacgacagctaatgcggtgaatctaatggctgcgggatcggctttaaccaatatttttccgaaatttaaattaacgccggcattgtgggtcgtgacgttattggcaacggtgatgacctttatcccggtctatgttgcctcatttttaaccactttcgaaaccttccttgatagtattgggatgttcttaggacctgaaatcgcagttttcttggtggattacttcattattagacggtggcactacaatgttggtgcgctcaatgaagttgctggaccatactggtacaccaaaggatatcatctgacagccatgattgcatgggtcattggggtggtcagctacttggtcttaaatcaattcgcgattattcacgcttatacgggggcaacgtttatcgcaatggggctgacagcacttgtttattggttaatgattcaaagaaaagaaaagacaatttaagggaactaaaaaaacgtcttaattaaggcgttttttttaatttttaccacagagttcatataattttcatactttagttttacactatctttattaggaggtgggtcatgttcttcattaaatcaattccagctaatattcggtattatttacgccaatctttgttaatctatctcgtggattgcctctttttaggcgtcatgctgattgcgctgagcttgatcagtttagaacgacatgacctcaaccagttgaaaaagcaattagccaactttaacacaactaaagaggggactaaccccctgacacatctggttcaaagtaaagaagtcttactgggacgctatcaatttatcgcggtagtgctgactatcgttatcgcacttgtgattggtattttgacttggcaagcgtttaagaagatgcgtcaggatatcgatactttcactagtgcgaattggtcgcgacatacaattgtcaattattatacgttaacggcgctttgcttactaatcagcgcaagcgtgacagtgattttaggttggttattagtcaattcctactattggcgcggattagagctgattaatcaacagtggctacaaaagccgttgcgaccaatacaaggtccccgagcatttcaaccgttatttaaaaatcatctgactgactttagtagtcattcgttattgaatccgattttgcatgagagcaccaagcagaatttaaccaatcaagtattcgcccaactatgggcaccatttatcagtctaattgcaccagtctacattattggttggtgccaagttactcgctttaggaaaatgagaaaggcgtgattgaaatgctaaataaacaacccttagcacttggacaggtctattttagtcaaccggagatgattcatcagagccttgaatcacctgaacccccatatgtcattgattatgaggcgcctaagattctaccctttatgtccggttgggataacttgttgcttcctaaaaagcagcttgcaccaacgttaaaaatgttgattgaacagcatttaaagcgcagtcggagtttattgggcaccgaattaccgccagtcgatcagttctggattcaattgattcgcggtttagcaagccaccagcaactcgtggtggtcaagcatttcttagatgaacttccaccaacggatgctcgccaattattaaatgatgtcagagcggtagcagcgcagtttcaaattatcgtaatcatgacaacgactcaggaatccgtttttaatagttttcaatcgcaggtgattagctaacgtcaaaaaaacgcaaggacaatatatgttgtccttgcgtttttttttgacgattattccgtatcgctagttgttgttgcatcagactcttttttcagggcctttgattttggcacttccgtgaggcttgattgatcacccgctaattctggagcatcggttttaaagagcccaacagtcgattgatcaccattttgcgagaataaactggttgaattagcccctaatttattttgaatatcgacaagctgttgatagccagtcagatagttataatcggcagggttcactggtttaaaactttgtggtgtatagaaacgtaataggttcttttcgttaactgaatccgacaaactcaattcgtggttcacttgtttctgccaagcagcgacttgtttttgcaacctagctgttggttcagttacttctgtcccatcctgattattgtagatggtgccatcgagtactgtgtaatcaggggtgacaaagttatggtttcggaaagccacgacttgatcatgttgtggtgataataaatcggtgccgaattggacgtaatttttattatcaatcccgagtaagtgaagcattgttggtaacgcatcgatttcgccaccatattgtttttggataccgccttttaaaccgttcatgtgaatcatgtaaggcacacgctgtagttgggcgttatcgtagtcggtccacgtttctgggtcgcggcctagtacactgagtaaggccttattatcagaattcgaaagaccgtagtgatcaccatagaggacaatcattgaattatcatagagcccagaggctttaagataattgaagaactcttctagggattggtcaagataatgggcggtcgcaaaatagttgttgaccgctgtattatcagttgtggcacgggggaagtcaccgtctttttcgggtaatgggaatggaaaatggttggtgacggtgatgaatttcgtgtagaacggctgttgtagctgttcgagatacttaatcgattcaccgaataataatttgtccttcaagccgtattgtaagacgttatcaggatcggtgttaaagtaggaagaatcgaagaagtagttgtagccaaagttcttgtagacgttattgcggttccagaaggtgcccacattaccatggaaaacggcactcgtatagtcaccgttttgcttgaggattgatggggcagcttggaaggtgttatccgaaccaagcgttgtaaagactgagccttgtggtagaccgtagacgccggtttccatcatgttttcggcatcactggttttaccttggccaacttgatggaagaagttttcaaaacctaatgtattttgatcatgatagaggctatttaaaaatggcgttacttcgcggccttcgaacttaaagtcgattaggaattgttgaaaactctctaaatgaatgacaatgacgttcttgcccttcgcaacgcctgcgtattcagcgttcggtgcagcgtaatgctctttcataaagtcgagcaccggatctaagtcgtaactctcagcttgggcacgcacttgattattctgagtagtcttgaaagcatcgtagacggtgaaggtgtcgatgccgaggtacttaacgatgtagttccgatcaaacgtccgtgataaaatttgaggtcggctgatttcacttaagccaaggttgatgccaaataataagacggccaatgaggtaatactgaaggcccaccaccgattaaatgcgtgtttgtcgatcttgatgaccttggttaaaatcagcaaggctaagacaataatatcaatccaatacagcgcatcatgccagttcatgagggccagtgaacttttgctgagcccagccgaaacttttgaataccctaagatggtgttgatggtcatgtaatcggtgaattgccggtaatagatgacattaaaatataaaagagcggtgttggcggcatagataatcaagcccaaccaataactgagatgcggctggcgaacataaagaatgatgccgaataaaaggagcgtcgtcgcgaccggattaaagattaaaatagcaatttgtaagaagccactagctgcgaggttaaaatcggtgaagtacccgaataacgtttttagccaaaataaaaagactaacaaactcatgaagcctaatctcgtggataggaatgatttaatttttgtgagtttcaaataatgtgacatcctttcaaaaaacagaactaaaagagcgctaatgccttattttaacccgagggcggcattagcgcaaatagcagtttaaagtttaaacagaaacttaacgtttcgcgggccgcatgatggcatcgtactttggattcagttgatctggcgccaaaacatgttgataaacggcttgtaattcatggccgatttctgtaatactcttagactgcgcagtttggtagccttgagctgttaaatcgggaacggcattagtgaccattgcttggatgagttgactgaattctgcgttagtgtggcccatgtagcagttttgttgatcggcaagccagccatggtaaaccggaatatcgcgcaccaatactttttgatgacttgcaagggcttctaagacgacaatcccttcagtctcttcataagaagggaagaaaaataagtcagcattggcatacgcaccttcgataatatcgcctttgatataaccagggaagatgacgttgtcgggatgatcctgtttgacaatccggcgaatattggctggaatactgtacatgggtacatctccaaaccagataaaggtgtattcgggtagacctttggcgatttcgacaaaatcgagaatccctttgcgtttaaagaagaggccgacgcagataatcactttttgatcaggctttaaatggaagaaattccgaaaagcagcttctttagctggtgtggcttgatacttagctaaatcaatgccgtttgaaatgggagcgatagggttggttagaccatagctttccaataatgattttgaataaggggtgggggtaattaagtggtcggcttgttgatagaggctaacgaggtaccgtttaacaaatggagcgagttgattggaaccaacaaaggagttgcgaaaatcttcttcggtcgaatgtgcatgataaatgacgggtttccccattttacgcgcctttttgatgacactgcggcttttgagtccgtatgtattgatatgtaagatatcgtaatcttgatcattcggatcaagcgtatagtcaatccccatttcggttaacgcgcgtttttgatgatccaacgcccgcccaattccagatttagcgagtagtttttcactttcaaaatataatagaactttcataaaaggctcctgtttcaagttatagtaatttctattatagcatagcacagtaggcacacatcgggctaaagttgggcagtcgatacctaatagtttaagattcactttagtcgagtaattaagcgttatttattgaaaaaaaacagctataatggacttaattactcattgaataatgaacagataggttaaattagtggaataagtgaggttggttttttggtatttcttgggcgtatttatgaacaatggatcctcccttggggggaacagtataatcatttaccactcatcaaattgacggtggagagtttagataagacgattttgtattgtttggtttttattgtgtgccggttagggtacttattaatgaaacgacgcaaaatacagcttctcccagaactgaaactattgttatttgtgttttatattgccttattggtctcattaacggttttacggcatatttattatccgtggcaaatgcagctccatttgcaacgaccacttagccaaattaatttgacaccgtttgttgagactttcaagttacggcaagcgcccgcccagattgattattggtataacttctacgggaacattgcgtggtttatcccgtttggtttattgcgacggtcattgacacagcgcaaaggggattggttgattacgattattgaaggggctctgttatccctgtgtattgaatccgcccagtttgttttagggactggcatggcagatattgatgatctcatgtttaatacattaggggtgatgattggcgtcctgttatatcaagtcctacaacatgcaaagcgaaaacattaaggttatcaacggtaagaaaacgcttatcgttgatttttttactaaaaaaaacgcttttttacgtaaaatttacgtaagcgcaatcacgactgggacagttgcttacatgacggtagtgaaggctggtaacgattgaatggtgccgttttcctactagccagcggatataaaactatgtataatggattcttgtactttagagaagaagaggaatttataaatggctattttaattgcattaatccctgcacttgcatggggtagtatcgggttagtgagtggcaaacttggcgggaatgcctatcaacaaaccttaggaatgacaattggtgcgctggtttttggaatcggtacctttttagtattacaacccgctttaaacttacggattatggtaatcggtatcatttccggtttattctggagcattggtcaaggacaacagttccaatcaatgcaagcgatgggtgtttctaagacagtcccattatcaaccgggatgcaactgattgtaaacactttagcaggagctttgttattccatgaatggaagacaacgcacgattacatcttcgggattactgcattagtgatcttaatcgctggtgccacgttaacttcaatgaaggatccgaagagcagtgttgctgctaaagaagatacacaatttgcacgtggttttagagcattaatcttatcaacaatcggttatggtggttacacaatcatcgttaactggtcacacattggcgcaacatcaattgttttaccacaagcaattgggatgttcgtcggtgctgcaatctttgccggtgttggcattgggacagcggtcttcaataagaaaacagcactcaacattagtactggtttattatggggtcttgggaacttatttatgttgatttcaatgaatgatattggtctagcaattagctattcattatcacaatgtggcattatcatctcaacaatcggtagtatttacctattgggtgaacaaaaaacgaaaaaagaaatggtttacgtcacacttggctgtttattagtcattgtcggtggggtcaccctcggtatgatgaagtaagcaacttactaataagtcacctagacaaattgtctgggtggcttattttgtttagagtgtgtattattctatagaaaaggcaaaagaagtgagtcagatgaagagaacaaataaaacagctgtcagttactatttattgagtgtgctagttcccatgttattaatggtggggctatatgcaatgctccaaattgtgccgtttggacggcataatttattgattagtgatctcggtacccaatatatgccctttttggcagagtttaaacggcaaatggcccagatgaatttcagtacgtattcattttcactttcactgggtggcgatatattaccgctagcggcttattatttaatcagtccttttaatttactgctcctattttggtcgaatagccagttgccagtggtggttgggtatgtcattattttgaagattggggcaatgggtttaacgatggcccattttctaaagacgcgtcagcctgaatatcatttttccgcgctaatttttgcaacagcttatagtttaagtggctttgtggcaatgaacttttataacctaatgtggttagacgctctgattttcctcccactggtcatcttaggattagaacggctatttttaaaagggcgtcctggcttatatatctggatgttggttgccactatctttaccaactattacttgggttatatgtcatgtctatttgccgttttgtatgcaattagtttgttaatcaaatggaaacaaccccaacagtcttggtggcaactagtggttcactggcggcaggctatctggcagttttgttgggcgtcattgattgcggggggcacaacagcagttgtattattgccgtcgttacttggaatgttgaagactgggaaaaagacaatcgctgcaaccagtttttatccaaccccgcagtttggctgggaagttttgagccaatttcaagtcggcggcagccattatacgcaacgcttaattcatgaaccaactttatttatcagtacattagcgctgttatttgcggtctattatttctgtctaccaaccattcgacggcaagcaaagtggtcgaacggctttttaattgttagtttagcgttaagtttctgggtaacgacatttaatacgatgtggcacatgttccagcaaccagaagggtttccatatcggaatacctatttgatggcatttgttctcatcaaaattgcctatgaagcaagtattgaaccaatcggtaaacgtcaaacgaaacgcctggttattttgatagtcggtggcttgctcagcattggccagttggcgctctactatgggccacatgtacgtggtgtgcagaaacaatcgctctggttgttaatcggactaatggttttggctagcgttatttttgcagcgtggcaaaaaggagcacgttggcaaccatgggtgattggtctgggaaccgtattgacgtttagtgaactggtgattaatggccgcttgacgaccactaagttaccgatgggcgatcaagttgtttatgcgcaacaataccaacgccaagcagcactctttgaacagcttgaacggcaaacacctgatttctatcgcgttaataaccaagcgattctcttaaaaaaagcgtttaaggaaccgtattatgggtacaatgatgcgttgacctttggacagtatacattgaacaattattcttcgacacttgatgagcggatgcggacgatgttggttaatctcggtttttatagtaagaatgcccggcggattaacgggattgggcatactgtgctgactgatctgctatttgccaatcaatatgacctaattgctaagcaaggacaggttgtgacacaaccccataaaacgttaggcttagggtttgcggttaatgaccagctagcacacgtggctttaaaagcacatgaaccgtttgaaaatcaagatcgaattatgcaggcgatgacggggcaaacgacaccattttatcaatataatcaattagatttacaagcgcaaaaacgtcggcaaattacgtttacaacgcaagttaagacaagtggatatgcttatctatacttgccgcaacaaaacttatcaaagctcaaagtgaaaattaatggccgaacacataaagcaccgattgaattgaatgggaccacgattattggtttgggtcgctatcaaaaagggcaacaactaacgctgacaattaccagtcggcaacctaaagcctttcgtaagattcaggtggctagtttagaccaggttcatttcgatcaagcttttgatcagttggcacaacaacgcttaaagatcgacctaaaacaactgtcggcagataatggtcggattgctggtgtagtaccagctaagaccgctgatcaattactttatctaagtgtgccgtatgacagtggttggcatgcgcaagtcaatcatcaaacagttcgtacacgacgagtgatgggcaatatgcttgcagtgccacttgagaaagggactaaccaagttcgcttagtctatcgtgcgccgggactaattatcggcgcgatcatttcaacatttagtttaatgacatggggacttatcttaattaagcaacgctggcattaaaaaagcaggttaacgatgacaatcatcatcgctaacctgctttttattgtggcttatttggggtgtagttgagtggctaagccgagaccaattaaggtcaggccgagcaaactaacaaatacgacttggtaaccggcgacacttaaaaggagagttgcaagggtgacgcccagcgcgcccgcaatttgacgaatcgtggttgtgacggcagttccgtcagcgagcacttgatccggcaggctattagcaccaagtgtaacagcaggcatcatgacaaatgcgttgccgccttcgatgaaacaggcacacaggatcatcaatggtaatgacagccattggtagaagccaatcaaagctagccatccaatgctaatcatggttaggccaacgagtaaggtcggtttaaagccaattttatcagctaaccggcccgcgagtggattcaaaaggcttaacacaacggcagcagggaccaatgctaatcctgaaagaagcggcgtcaacttcaattgagcttgaaaatataatgggtagatgactgtggtgacaatcaatgaaatataggaaatagcagtcaatccgaccgcaatatcgtagttaaggtaaccgagaatatgtaaattaagaagtggcgttgtctgggtgagttgccggtagacaaaataacccagtgctaggcagctcactaatccgataccccagagtccgattgggttgatagtaggatgattagcgctactgatgacatataataaaccgattaatccagttgtacataaaacggaaagaccatcaaggtgatagggcttagccggcataatatcagaaatagtgaagttagctgttgctaacacggttaagataatcagaataaaggcgatgaatagtcctcgccagctgaagtagttgagaataatccctgaaataatcggcccacaagctagtgcagagcccattactaaaccagccaggcccataatttggccccgttgattttcagcagtaatggttaataagacagtttgaaacgatggaaataaaacacctactgcgatggcttccaacgcccgcccgaacaatacccaaccgaactgattagcgaagacaattaatagcgttccaatagtaaataaacttaaaatccccatgtagagtcgtttgaatgggatgttgtttaataaccaaggactaatcggcatcatgacacacattacgagcataaaaccggttgtcagccattgaacagttgtggctgataaatcaaaataggccattaaggttggataagcagttgaaagggcagattggctgatagacattgtgaacgtgccggttagtagggtgaatgtaaatagttttagtgctgttccagatagataacgttggttggacaagtaatcagatcctttttttggcttaccttaactataggacgtcatgttttatttgtaaaatgaaacgcaatttgaaatcgttatcggtaacaaaggctaataattagccttttatctatacttagtatatatttatactcatgatgagtatttagatattatattaaagggggaacgaccatgagtgtcaaagcggatcaactatcgactcaggaatacatcgtacggtggaatcaatttttagaacggtttatcgtgtttgaaacagtatttagtgagtacacccggaccagcaagaacatcatcaaagggcgctgtctggtggacgaaaatttggaatcgttaaacgaatattttcaacgtaacttacgggtttttaaacaatttattgatcaagccacattactaaatccgccaaaagaattacgagaaattaaccgtcagttacaattagtaatgactgattacgtctcgtccgctgaagccatggtcaccgccttcaacgagggtgatgagttaaacttatatcagaaactcacaacgagccgtcaacaacaaaagagtgatcgaatacgcattagtgaacttttaaatcaaatcgctgtttttaaaacacaggcagtcaaataaaaaaacgacacccatctggcaactctcagccggtgggtgtcgttttttttgactagataattttacgccgagcatgttcgataaatttaaacttatcggcacggtgaatcgattcggtgaattgaaggagggtattatcttgtagatgggtgacacctttaacactgactacggagctgttaggcggtaggttcagtatctgacactgttcttcagtggcgggaatcaccgtgaactccttactgccatacccaatttcgagtttgagtgtttcttcaaagtaacgatagagtgagtcttgtgcaaccccttttgaaatgtgggggactatgctagttaagacgtagtcgttatcgattaccaggggctgaccgttaacgacgcgcagccgttgaatgtaagtggcaggtaactgctcttcggattcaagatggaaaagggtttggggaacggtcgtctgtgttaattgcaagacttgagtgtcagtatgcatatcgaaaagactatctaattcacgataactggtcaatcctgaaatcggaaaagcatacttgtctagaccgagaaccaaagagcctttccctttaattttatggataaagccattttcaagtagactacctaatgctttgcggacggtttcacgcgacgcaccgtagagttcagtgagttcattttcacttggtaagaaagtgccgctttgatagagttggtgcgtaatcttgcgcacgagatctcgataaatcatttcatattttttagccattcgatattctccaatttgttttctcattcctatcataacggggattcggtgaagttgcaaggttagattaagcgctaacaagaaaacggttttaaaaagtgttgaaaacttgtacgtacatgatatatgattacggcgtactgagaaagcgcttttattcatgctacttttaattcaataagattcgggaggaattattatggctcaaaaggattattcacaactcgcacaggcaattgtcgccggtgtcgggggtaaagaaaatatcgatagtttaattcactgtattacacggcttcgtttttatctaaaggacgaatcaaaagcgaagaccgaagaaattaaagcattagatggggtcattaacgttcaaaaggcctctgggcaataccaagtggtcattggcaaccaagtcactgccgtttatgatgccgtgattgcagaaatcgggacagagtttgctggcgaagatgaaacggcccaagttgtggctgcaacaacgcgccaacaaaatttaacgccatggggccatgttaaagaagcctttaatcaattaatcggcgtgattaccggtgcgatgagtccgattgtcggtatcttagctgctggcgggattttaaaaggtgtcttggcgatgctaacgatgccacaacttggcgcgttattaagtgctaagagtgaagcgtacattgtcttaagtacgatgggtgattctgttttctacttcttacccatgttggttgggttcactgccgctaagaaattaaaaggtgatccagttttaaccgctgtcatcggtggtgttctggtgcatccttaattagtggctttaaacgggaaatcattgcttgaaatcgggtcattaaacttcccaatggtcaactacacatattcgattttcccaatgattctcgcggcttggttgctaaattaaccaaatgggttaaaggctggttaccaggctacttacaaattatctttacaccattgattgtgattgcagtcgtttctgccattacgctttacatcacagggcctgctattatttggttatcaaatggtttagcattcgggattcaattcttattattaaagagtggttggttatctgggttattaatcggtggattctatcaagtgcttgttatcttcggattacactgggggattttaccaattattgccaacgatgttgccgcaacgggtcacagttactttaacgcgattttaagcacaacaatgattgcacaaggggccgctgttttagctgttgcgattaagacccgtaaaacagctttaaaagaattatcatttgctggtgcgatttcagcattctgtggggttacagaacctgctatttatggggtcaacttgaagttccgacgcgtcttcattgccggtttacttggttcagccgctggcggatttgtcagtgggttattccacggtaatatgttcggtttcgcggggtcgtggatcggctttgcatcattcttagatccaaaacacctagcagatttatcaaacttatggattttcatcgcgtcatcagcggttgcaacgattgtgccatttattgtaacgctcgtttggggttataacgatcaaatgacagctggtgaagcaatggctaaaccacaaaaaccaggaacagcaaaataaacgactgaaataggagagatatcgcatggcatggtggcaaaaagcaacagtttatcaaatttatccgcggagctttcaagattccaacggtgacggaatcggggatatcaacggcattattcaacggttagattatttacaaaatcttgggattgaattgatttggttgacgccaatgtatgtttcccccggtcgtgataacggttatgatattgcggactattaccacattgatcccatttttggtgatttaaccgattttgaacgactcttaaatgaagcccacaaacgtgggattaaaatcatgatggatatggtggtcaaccatacttctgatcaacaccgctggttccaagagagtctcaaaggcaaggataatccgtaccatgattattatttgtggcgtgatccagtggatggacacgaaccaaataattggttatccaagtttagtggcagtgcttgggaatatgtgccagtacttgatcaatattatcttcacctatacgaaaagagcatgccagatttgaactggcggaatgaacacttgcgggccgagatttttaaaatgatgcaattctgggcagaccttgggattgatgggctacggttagacgtaattaacaatatctcgaaggataaagacttcccgaatgatacgtttaaaacgccaagcgacgatgggcgcaatttctatacgaatggaccacatgtgcacgaatacattcatgaaatgtacgaaaaggtctttggcccgaaccaatttgtcacggttggggaactttcctcaaccccaattgatgaagcgattcgttataccaatccagcccgtgaagagttatcgatggcgtttaccttccatcatgtgaaggttgattataccggtggcaaaaaatatggacactaggcgattatcggctgtctgatctaaaacgggtgcttagtgattggcaaacggggatggctgccggtggtggttggaacgcattattctggtcaaatcatgatcagccgcgtgccgtttcgcgcttcttggatgacggtcaataccgcgatcaatccgctaaattattagcattagtcgaatttggcttacaaggcacaccgtatatttatcaaggggaagaaattgcgatgaagaacgcgaacttcaccaccgttgaccaatatcaagatgctgaatccatcaatgcttaccagcaaatgttgagcgacgggattgatgaagcgttagcgattaagattttacagcagaaattacgcgagaactgtcgaattccgatgcaatgggatcaaacggcgcatcacgggtttacgactgggacaccatggttaatgccggttgagcacgatgattactcagttgccgctaagattcatgaacccaatagtgtctttgcattctatcaagaattagtgcgaatgcgtaagcttatgccagttttaattgaaggggactaccaattatttgaaccagaggacgaagcggtttacacttatcaacgacacctagatactgaaacgattcgcgtgatggctaattttactggtcaaacacaagtccgttcaataccacacgtcaaggacgtgctcatggataattacgaacaaccgcagtttgatggtcagcaaatcactttacgaccttatgaagctatcatgatgcgggtttaagaaaagaggaagaacgatgtttaattttttgaaaaaaggaccagttggacaggtaacagcccccgttgctggcagttatttaccaattgaacaagttaccgatgaagtatttgcaagcaaggcagttggcgatggctttgccattacccctgatgaacggcaaacaacgattagcgcaccaattgatggtgttgttagttcgattttccccactaaacacgccatcatgattacaacaaaacaaaatgttgagattctgattcatatggggattgataccgttgaattgaagggcgcgccatttacgatgcacgttgaagcgggtgatcgtgtcaaagctggcgaagcgattgttgatattgactggcaacaactagcagccgcccaaaaggcaacgactatcatggtcgtcagcagtaacgccacctttgcaccagcagagccactaccaacaacagttacgactgacaccattgttggacagttcgacttagcggcagaataggtgggttaagatgcaaccaatcattattgaatctgatgatttcgggatgaccataccgatttcgcgcgcaatcattactggcttaaaaactggcgtgatttctaccactaatgcgcaagtgacatcgcctcattttgaaatgagtgcggcactcgcccagcaacatgggattacggcaatgggattgcacttggttttcgacaaagaccgcccaattagtcagccactgacgattcccagcttggtaaccccggctgggttttgtcatgcttatcaaaccttacaaactcatccaaaacagttggccattactgatgttaagcgtgagtttcaagcgcagattgaccgctttttggcgagtgggttacaactcacgcatttgacatcgcaccattttgtggcaacgttaacgcctgaaatctatgcaattgttctagaactagcgcaaacgtatcatgtccctgttcgcaatgaaacggcgcatttaagaccgacagaacaagcgtcctacctgctattaatatcggaatatgccgttttaacgactgggacgttgataacggcgcaacaaacaccgtatttaacgccacaggaaatcaaacggcaactgacacagaaaaatttggtaggtacgccggtgatcttaagccatattgggtatttatcggcagagttacggcataagagtcgtctgacgacgaatcggctagccgaattcaatgcgcttaaaacattaaagcaaaccaattattgggatcaatttagttggcaactgacggattactcagaattaggagcgaagtagcaaatgacacaatatcaacatttaacagtacttggtgatagcatcacggatcaacgtaatcattacgcacacaaatggtactaccagtggttagcagaatggctcgcgattcccacaatcaccaatctcggaatttcggggtcgacgattgcccaaccgtatgatccgatggttgaacgctggcaagccattcctgaatcaacggatttattattgatttatgcgggtgtgaatgactttggtcgtgatgtaccacttggtcaatttggtgatcagtccacagtaacattctacggcgcactacaaaaattacttgggcagattacgaaacgttacccacaagcgacggtttattttatctcgcacgttcacattgggactgacttcttttcggccgtcaatcaaggcggttatcagcaacaaaattatgaacaagcgattgcgcaagtgacggacttgtttggcgttcagcatatcagtttgtttaacgaatcagcgttgtcatttgcggatgcacaacaagcggctgagctgagtttagacagtctccatcccaatgatgctggccatgaaaaaattgcccagttcttgagaactaaaattagataagcaaaaaggcatcgagctaaaagttaatttaagctcgacgcctttttttgtggctgaatttaagttagattagaacaaatgatgacggatttctttagaagagttggccaatcccgtagtgaatggccattgtaattaaaccaattaggatgttccgaataatggagactttgactttgccatcgcccagtttagcgctgataaacgcggtaatggaaaccgcgatggtgacggcaatgattgtgccggtcatcttgtaggcttcaggcagtagaatcattgtcacaagggggaagacgccaccgaaagcggctgagaagagggatgcaaacgctgcggcccacgggttcatataatggccaagctctaggtcatatttaacattaacaattgttgctaaaggcttcttatgcattaagtccttagcgattgcgagtgccgtttcagaagtgacacctttggcttcgtaaaaagcttggacttctttaatttgatcatctttagctgtttttaagcgtgcttgttcaatggcaacagcggctttttccgtgtcactttgcgaactaactgaagcatattcacccgccgccattgaaaaagcacaggctaataaatcagcaagtccagcgataaaaatggtgaaattattggttgttgcggcggcaacactaaagagcacaccgacaacggttagaatcccgtcattagaacctagaacgccggctcgaagggtattcatcttttcttccatcgtttgatggggtttttcagttgttttgagtggggctttaagaggggtcataaaaaaatcctttctaagcgattattgtttgaataatgtcccaatagcgtaagtgactaccatggttaataatccggaaatcacattgcgcaacatggcttttgaacgattcgctttgccgagagcggctgcactgtagccggttagcgcaagggcaatcatcactgcaatgatggtggcttgcacgcgaatggtttggggtaataaggtgattgcggctagtggcaaaatagaaccgattggaaatgagatgaatgacgcaacagcggctgcgtaaggactggtaaaagcagtcgggacaaacccatatttttcacgtacgacagtcgtcaacggatcagcagtcatcatttcgtgtgtagcccgattggcaagttcaggatcaatcccagtgttgacgtatttttgccgaacaaaagccatctgagacgcataattactgtttaaattcaatttcgtattaatgattgccatttcctgtgcgtctttttgcgtgctgacagagacgtattcgcccatcgccattgagatcgttccagcaatcattccggcaattcccgaaatgaagatggcgaagctattgcttgtagcgccggcaacaccgataacaattccggcgacggataaaatcccatcattggcacccatgacgctagcccgcatcacgttaattttttgggcgagtgataatttttttgacaaggtgaagcctccaatactttttattactttataatgattataattaataacaactttcattttagtcaatttaatttgaaagtcaagtagcaacctagaccaattaaatttgaaaaatggcttgccttcgagtgtactttaaggaatatgctaaagacattaaagaaggggtgattaaaatgagtcgcattttagtattaggggcagccggacaagtggcccagttagttattgagcaactgttgaaagaaaatcaacatgagctcgtgctatatttacggcacgctgaacggctaagcgcattagcacaaaatccacatgtcacggttattgaaggtgatgtgttggatcaagagctgttggcagacagtttagctggggtcgatatcgtttacgcaaatttaggcgggcagttcgaaccattaatgcaaaacgttgtcgcgacaatgactgcagcgggcatcaaacgattaatctatatcagtggattaggcttgtatcatgaagtgccaggtgcttttggtgagtggaatgaacaagcagtcggccatgaagtcatggatgacacgcggcgggcggcgaagattgttgaacaatcttcgcttaactataccattttacgttgtgcctatatgaccaatgaagatcggatcgattacgaattaactgaaaagggaacaccgtttaaagggacgattatttcacgacggagtatcgcgcaagttgttgttgatttagttaatcatcctgaaaaaggaattggggcaagttggggcattaatcagccgaatattgatggcgatcgtcctatttattaaaaaacttgccttatagtgtactctaaggtataagctatttttgtaggagggatgtcgatggcacaagagcagtacaaaatcggcgagtttgctaaattagttggtttgtcgacttacacattacgttactatgaagaccaaggcttgattatgccgcaacgcgatgcggccggtgtccgcttttatacattagaggacgttaagtgggtcgggtttatactccatctaaaagggaccggtatgcggattacagaattaaagtaatatgttgcattgcgggctcaaggagacgcgacgattgaagcgcgcaaagctttattgcaaaaaacaaaggctcaagctgaagccgaattggctgagcgccaagcaaatttacagatcctaacgcgtaaaattgattggtatgatggtaaattggatcagagtatcgatcaagcagagagttttgaaacgtatttacaacgatttgaatcctaataaagtgaggttattagaatggtcaagaatgaacaattaaaagaaaaacaattattcccagttggagaagctaatgtggcttatcaagacttcttcgtcggtcaaagttatttatcaatgttagtgaacgaaccagacgtgaatgtcggtgtcgggaatgtcacgtttgaacctggttgtcggaacaattggcacatccatcatgctgggtaccaaattctattggtgactggtggcgaaggctggtatcaagaagaaggtaaagcagcacaacacttagtcccaggggatgtgattgttactaaagacggcatcaaacactggcatggggccactaaggatagctggtttagtcatgtcgccatcactgccggcacaccagaatggttagaagctgtttcaaatgcgctttatgacgcactttaattcagaaaggggtttttaaaatggcaaagaaacaaacagcaggccgcgatctattgggtgattttgcacctaaattcgctgaattaaacgacgatgttttattcgggcaagtttggtcgcgtgaatcagagttaccagcacatcaacggagtttaatcaccatcagtgccttgatttcaggtggtaattttgaataattaccagcgcatttaaagattgataaggaaaacggcattactgaagctgaaattgtcgaagtgattacgcatttatcattttatgtcggctggcctaaggcatggtcggcgatgaacgctgctaaagcggcttatcgaccagaataattaatcagggattaggacagataagattgtcctgatcctttttttgatggtatgatagacaaacaaatcagcatcaagaagtggaggaaaggccttgaacgagccacaaaaaaattataccaacggtgttttaatgactttatcagtgattggaatgaaatggaaaccgttgattctctgtcatcttgtggcaggacctcaaagaccggccgaacttaaaagagtcgttcagggaatttcagccaaagttttaaccaatcaattacgtgaattggaacgagatggcatcattactcgaaaagtttttaacgaagtacccccacacgtggagtatgcgatttctgcgtacggcaaatcattggtttccgtcctaggaatgatggccaagtggggcgaagatagaatcgactttttacagagcaatggtgatgatgtgcagttggattatcgagaccatgagaaatacgatatttaaagaaggcgataacatttattcaaaaagaatgttgtcgtctttttagtgatttcacaaaacttactttgaggtgcgttagttagttgaaagtgcgtaattgtttattgcgaagtacccgatatactaaccttatcaactaaaaagtgaggggaaaagaaatgaatgatattcaaaataaagtcgttgtgattaccggtgcatcaagtgggattggtaaagagacggctaccttattagcagccaaaggcgcaaaacttgttttagcggctcgacgaacaagtgcgttggcggcgttggcaacggcgttaaccgctcaatacgacactgaggttatttaccgacaaacggatgtgacgcaattagcagacatgcaagccttaatcgaattgacaatcgctaaatttggtagaattgatgtgctattcaataatgccggcttaatgcccgtctcaatgctacgcgatggtaaagtcgatgagtgggagactatgattgatattaatatcaaaggtgcgctatatggcattaaatatgccttacctttaatggaacagcaaaagagtggtcatatcattaccacggattcagttgccggtcatttcactggtgaaggcttatccgtttattcagccactaaatatgcaatgcgcgcggtgatggaagggttacgtgtagaagaagttggaatgggcattaaatcaacgttgatctctccaggacatgcgcaaaccgaattagccagccggattagtgatccgcaattacgagcagctgttctcaagagcgaaactgaaactggattaacagcaaccgatgtcgctaatgccgtaatgtacgccatcgatacaccagataatgtgggcgttaatgaagtcattctccggtcaattgatcaaagagactattaagccattggtcaaagattgaattgagtcttgacaacgaacgctaaaaataaaaaatattttcgaatggtctagttcagcgcttgcaatcgtaagttaacggcactttcagaaaggctttgaaatcagctaccacaaattgaattaaatacaagagtttaaattagaatgcttagcgtgtaccatatatagtgttgtttcgtcagatggtgcatcaatatatggaaaatggtgttgacgatctggagtgataactaaattcatataaagagggtttcagttcaatgcaagacaatcgtgcaatcaccagtgtatttaatcctaagtggtatattcaacagatgaaagggtggacaacatccagttatggtttgttgatgtttgggttaggctttattttagctgctactatttccggtggtccaataactggcgtgtcgtttttaacgatgctcgcggggatgttaggcttcacctgtactattagtattacgaatacgaaacctttaaatggtgtctttggtgtcatctctgcattaatctacattattgtggcttataatgctaaaaactataacgatatgttattacaaaccgtctacattattatgttagacatcccagtcttattaatgccagattgggcgcaaaacgttgataaaaaagtccgggggcttgctactcgtggtaaaggacttcgtaattgggcgttgacgctattgttctttgctgtatcagttgggttattatatctctgggaaagcaatatgacggacagtccacgaccattgatcgatagtatcgccgcttcagttgggtttactggcgcactgttgaccacattacggtttaaagaaagctattacttctggttcatccaaagtatcgtatcaatcacgttgtggggcattacagcaatgcagggtggttcaaattgggtcttattcttcacctatatcttgtacttatcaaacgacttagtctcattcttcgacaagaacgtcgtttggttccatcctaaagaagccattaccaaaaattaaatcaataaaaatagcgtcccaacacaccgcaatgtgttgagacgctatttttatgatggccgggttgttttatagttcaacaccgttttcttcaaataattctggtaatgtcttcagtgattgaccatcgtattctgcgaagaaatcagccacgctgtattctttgccagcaggacgagaagcatcatagcttgcgctaattgtttctgttaacttaccatctttaatggttagttctaattcttcaactggaatactccgtttgtcagtgatcttagcatcaattaagaatggtcggccagcttttgtgacttcaagggctttgtcaaaggcagcgggtaattctttagaagaacgaacggtgattgattcaatgcccattgcttgcgcaatcatggcaaaatcttgatcttcaatgaagattcctgagtaatccattggaatatcatcttgttcactcttgatgaagtttaatgcggcatttgatgtgataatgttaatgattggtaattggtatttcttttcagtgatcaagtcttgcatgaccattgaaaaggcaccatcacccgagatgttgaagacttggcgatctgggtagctcaattgaccagctaaggcaccaggaacgcctgaacccattgaagcaaagagggcagaaatcacccatttgttcttaggcgttaagttcaagtgacggaaactgttgatgatattatcaccaacatcgattgaaaagacagcatcgtcttcagcaatccggttgatttctttgtagattggttcgaattcaagcggatcagagtcgcggttcgttaaaacatcaaggtaggcttgccagtttgccatatcagcaacagcagctttgaagaatggtgttggggcaaccgtttcacttctggcgattactttttcaacaaaagcagttgcatctgaccagatcccgaagtctaagaaatggtgacggccaaattgtgcttcatcgttatcgatttggataaacttgaagtcatgtgtccgataaattaagttggcaaatgggaagtcagcaccgatggcaatcacaagatcactaacggccatgatttcatcagccgctttagaagcagcccggttagccatgcctaagttaccttcataactatcaggcactaaccctttagcaagcccagtcatgacgattggaatttgaagtttctttgataattcaacgagcttatcgccgccgtctttaatcccacgaccaacgtgaattacagggcgtttagcgtctttaaccattgctaagaattgatcaacttcttcgtctgttgcgactggaccagccacttttttacgatctgaaggtgagcttgagctatatggtgtatctggaatttcaacgtagccgaagtcatttggaataacaaccactgcgacgccattgtgtttgtaagcttcacggattgctttatcaacaacgtatggcaagctttcaggtgtcataacgaggcggttataaacagcaacgtcagagaacattgggttttcagcgaattcttggaagtagttgtagttcatgttcttgcttggtacttgaccaatcaaggctaaaactggtgcatgatcttcttttgcatcatataaaccagttaaaaggttagttgcaccagggccagctgaaccaaaagcaaccccgattttaccagttaatttagcgtcagcagctgcggcaagggccccaacttgttcgtgacgaatttgaatatattttaaacgatccttttcaatattaagagcattcattgttgagttaaatgagccaccagggtaaccaaagatatgatcaacgccccaagattcgataactctaagcatagcaacactagctggaatagttttttgagtagtaactgtcattatacagatctcccttaaatcaataattaggttgcacacaaccttatgggaataatttagcatacttagaaaacgattacaagtgttaaacgtaggttaatcatatccttaattaattaaccgctgataaattggtgcttgataagattgaatggatttaagcagcaaaaaccgcgctatccgaaaatggttagcgcggtttgattagtttaaatagtctagtaaagtatcgacagttaatgcttgcttttcagtcgcgttcaagtcggcaatcagtttaccggcttttaacaccaagagtcgattgccatattgcaacgcatcctctaaatcatgcgtaatcattaggcaggtgagttggttatcgcgaattgtttgattggtaaaagtcatcaatgcttggctggaaactgcatctaaagcagatgtgtgttcatctaataacagcaattcaggtttttgaatcgtcgccatcaagaagtttaacgtttgtcgttggccacccgacaagttactaaccgggcgattgagttgttgatccaagtgattcgggagtgtcttggcgagcgctttgatttgtgggagttgttgcttgagacgccggggaaataagcggcggcgttggccacggcgcatcgccaacaaaatattttcggcaacggtcatatcagctgcggtgcccaacttaggatcttggtagacacgactaatgagccgtgtgcgttgttgggcggattgcttcgtaatgtcgtggtcgttgaatagtagttgcccacttgtgggggttaaatcacccgcaatggtattaaaaaaagtcgatttacccgcaccgtttgcgccaaggaggacgacaaattcaccaggattaatcgtgagatttaaatcatttaagagttgtttaggttcattattatcagtaacttcaaaattgaggtggtttaaagtcatacgcggggtcatttggtagtcagtcctttcttttgttgtggtgcgatgatgaagatggccaaaatgacggccgagaagagtttgaaatcattggcgttaaagccgagttgtaagacaaggagtaagatgaggcggtagacgacgcttcctaggataatgctaattagtttggcgatgaaatgcttgccgacaaggagccgttcaccaatgatgatcgcggataacccaatgaccatcacaccgatgcccatgttgacatcagcaaagccgttatattgtgcaacgagcccacctgcaagggcaatcaagccgtttgacagcacgatcccaatcgttttcgtccgctttacggcaatcccttgtgagagggccatcgtgggattatcaccagctgcaatcagggattgaccgaattcggtgtagagtaagccagccagtaataatagggcgatcagcatgatgactaggttaatgactaagagccgttgatcgagcgttaattgatggaatagcggcagttgatataggttgtgttgatcaccaattgccatgttggcttggcctaaaatccgcaagttgatggaatacaaaccggttagcgttaaaatcccggctaacaaactctggacatggaagtagttgtataaaattgccgtcacgagtccggctaaacagccaccgatgaatgcgactaatagggaaaaggcaatgttatgttgttgcaacattaaagcgccgagggctgcgcctaacgggaaactgccttcaacggtcatgtcagggaattttaagattcgaaaggtgatgaaaacgcctaggcttagtaggctccataataatccttggtcaatggttgagataataagattcatttgagaacagctcctttttgattagcgatttgcattaaactctgcggaattgtgatgtggagggcttttgcttttttgaggtttaagactaaatgtcctttgcgtaaataccgaattggagtggttgcgggttttgaacgaccacttaaaacagcggcggtcatcttaccggtttcaacgcctaagtcgtattggcttaggccgacggttgcgagcccgccatctttaaccatcgtttcagcggatggaaagactggcgttttggttttgtcggtcacatggacgagggtgcccattacactagcaatcgtattatcggtgggaacgtaaattgcatcgacttttgggactagattctggctgacttgttccagatcgttgactgaactaagactggcctcaacaacggtcagccctttttgttcagcaagttgtttgaataagtgcatttgactggtggcagagttatcactgcttgaatagagaatgccgacggttttcagttgcggcatgatggtttgcattaatgccaattgcttttgaatcggggcttgatcggatacgccggtgatattggcaccaggatgggcgttgttcttaacgagattggcactcgccggatcagtcacggcgcctaagataatcggtaattgcttagtggcattggctaagctttgtgcggcaggggtggcaatgccgaccgttactttggctttttcagtgacgaattgattgctcatcagacgtaaattactttgatcgttctgcgcattttgaaaatcaattttgatattacggttgttatgatagccttcgcttgctagaccagcgacaatcccgcgatgaatttcatcaagtgcgggatgagataagggttgtaaaatcccgacaattggcaatttaggttggttggcttctttgatttttttgataccaagtagggtgagcaaactcccaaaaattagaatgaggggtaaaaaacgtttgagtttagacatggcgaaagctcctttaacgtgctttttgaaactgactcttgtgcttaactacatttaccaaaccggtgattacatcaccaatttggtaaattaggttaatgctcagagtcaaaccgtttcaaacgcacttctattttttaacgtgcttttcaaaccgtattcctgtgcctagctacgtcgcacaaacgaccgactgcgtcgttcattcgcaccactaggctagtgttcgaaatatacccggtttgaacgcactcattattatcaaacaaaaaagtcccccacatgacagtcatgtaggggacagaaaaagcctacatggatttcctcgagttaaaatccatgtaggcttaaaattcaatcgattactgatgaatggccgcatggatacaatcaaaagactgtatccataacggcatacaatctcacttagcggctttgccaacgaatattcaattgtactaagtgagtgtttgtcattttcagtaacctccgttttatttgatgatctgaagtatagcgggatgggtgaaacaagtcaaggactttgagtaattttcttttgaaaataaaggtgggtctagtctgaaaaagcggtcgatctggcttgctttttagcgctaaaaaagctaaagttattaacgtatacttgtgtttaaaaacaggaggaataagacaaatatggcacatatttcatttgatgcatcccgtttggacaaatttgtccaatcaaacgaacttgcagaaatgcaagcaatggttaatgctgcagactcacaattacgtgaaggcactggtgcaggcaacgacttccgtggtttcttagatttaccagtgaactacgataaggacgaattcgcccgcattaagaaagctgctgctaaaattaagagcgattcagaaattttcatcgcaattggtatcggtggctcatacctcggtgccaaagctgcaattgatttcttgaataacacgttctacaacatgttaccagcagaacaacgtgacttcccacaagtattattcgccgggaactcaatcagttcaagttacttaaacgacttagttaacttgatcggcgatcgcgatttctcaatcaacgttatctcaaaatcaggaacaacaactgaaccttcaattgctttccgtgttttgaaagacaagttgatcaagaaatatggtaaagaagaagctaagagccggatctacgcaacaactgaccgtgctaaaggcgctttgaagacagaatcagatgcagaaggctacgaagaattcgttgtgcctgatgacatcggtggccgtttctcagtattaacagccgttggtttattaccaatcgccgttgctggtggggatatcgaccaattgatgaaaggtgcagctgatgcccgcactgaatacacagatacagacgttatgaaaaacgatgcatacaaatatgctgctttacgtaacattctttatcgcaaaggttacacaaccgaattattagaaaactacgaaccaacattgcaatatttctcagaatggtggaagcaattgatgggcgaatctgaaggtaaagaccaaaaagggatttatccttcaagtgctaacttctcaactgacttgcattcattaggtcaatacatccaagaaggtcgtcgtaacttgatggaaacagttgtcaacgttgtgaaccctaacagcgacattgatattccaactgatgaaaagaacttggacggtttaggctacttagaaggccacacaatggacttcgttaacaagaaagcttaccaaggtgttgtcttagcacatactgatggcggcgtccctgttatgtcagttaacatcccagatcaaacagcctacacattaggctacatgatctacttcttcgaaatggctgtctcaatctcaggttacttgaatggtatcaacccattcaaccaaccaggtgttgaagcttacaagaagaacatgtttgctttattaggcaaacccggctttgaagaattaggcaaagaattaaacgaacgcctataattcaacgtttataaagataaaattcgacttttattaaagcatttagtctattgattttatgaaatggtgcagtatttggtgcattgttctaaaataaatggattaaatgctttttgtttaatacggataaagaataaaatatataaattgcttatttttagtaagcgaagtataatgaccttatcaaagatgaccaattcatcaataatattaaaagtaaaaatggagatgatggcaatgttagtcattcaatatgtcaacggtcaaacgaacgctgaaaaggtttatcaaaaagcggctgaatttgtcgcaaatcaacaactggaagtacccgatttcgaagattacgtcgcaattaagcgggggacgttggatgggcagccattaacgttggcggatgcgaccatgcgcggcttatataattatttaaatcaataaagttaatctgaaagaaaaacgtcgctcaagagagcggcgttttgagttataaaataaaaaagaccagccaacggcagtcttttaattaacgtgtagtaatcataatgagatttgagctgtgataagtttcgctaggactattttcgaggataaaagccggcgtgtccttaacaaagtgcgagatttttgcgacgatatctgcagcagcacagtctttgatggtcaacttatggcgtgaaccattcgtagaaccaaaggcagataatgtgtcattttgttggagcgcaatttttgagccctcgttaaagaataacttaaccataatttaaaaccacctttcgtaagtaaatcatataatattgataagaaaatcacaaggataattaacaattcaatacccttaatattatcaagtgcaattacttttcggaaaattattcgttaaaagaaactactttttctaatattcaaacgccatttcattaaccgattcttccaagccttcgacaacttcattttgttcaatgaacgttaaccaagtttgatattctttggcgtgttcaccacgaatgttgaatgccattttcacttgaatactagcgataaattcggcgaccattttatcaacggcccgatcgaccttattctcgttccaacgtttggcaggttggcgtttttggttcttttcattttggtagtctaaacctttggctcgaaatgtatcgatgacgcgggaatgttcttcaagataggcctgtagttcggcattgttcatagtcgtgctcctttaaactctaatagttagcaagtaaagattttagttcagcttgggcagcggtgtcttcagaaacggcaaagacaagtggttctgagtaagcttgtttgccgtcatcttttagttcgctgaaaccatcattagttgatgtgaggtgaccattacctaatttaagttcatacacgacgccgttatcaccaagtaggtatttgctaaccggtttgtccattgccatgttaaggctgtaattatccgcgaatgatccacgatctaaattgtctttaccgactgttccatccaaagcggtataaaagacacagccaccaattgcatgaacagggtaggcattaaaccctgggcttgctgtcccaggttgaactaaaatgcggccatcaggtgaattggcaaaccaatcgccaaatccggcagcaccgtggtcaaaataccaatcactgacggccatgtttccgattgtggcgcgttcagccgcccacgctagaaaagcttgattaacagaagtttgttggtcggcagtgagcgcttttttggcacttgttgactgattagattgttgttttgcttgttcaatagattctgaagctgcaacgatactttctgattgttgtttaatagaagcttctttcgagctagcgattgatcgacgctgattgctttcttttgcttctgatgaggcgcgatagcgtgctaaactttcggagtgggttgcggcttgttgatcaggtttaattgaccgacaactagctaatgaaagactacttaaagtaatgaaagtgactgcaatggttcgtttatgcatgttaaatcccccaagttaatgattaataagtcattgcacggtgtccctgtggtgcagcaattttccagaatttatcaaatgagattttttttcgtttgccggtatatggatcgttaaaggtaaatgaattttgatcatagccaattaataagacggaatgcgctggttgtttatggtagttaatccaagcgacaattggtttcttttgttttaaagtagctttgagcgtgctaatcggttcgtccgataaatcggtgaaactgccgagatattgatagaagaatcctgtccaagcaggaggatacatagtgtagccagtatcatcgtatggattcccccaaaagccgacctccatatcgccatcattgacataagggatactatcggccacttctgttttgctcatgtcaacgctacggtaatctaacagcatggcaacagccgtaatttcacaaccggttggtaattcaggaaattgtgaaatgggtgtgatgtcgagcatcgtttttttgggtgtttttttcttaacaattttttggggtgtggttttatggaagaaccaaatcccggcctcacttctggtcggtcctgtgaaaagccataaaaaaagggtggtaatcagtattaaaacgactgccacgcgcttgtaaaagtgttttggcatttgataatcctcattctaaatttagtcgacgaaataaatatttaaaatagtatagcatttaaaggggcgtaatagctatagccactcacggatttcaactgtgatggaatcgccaatttcttttttgagttgtgcacggatgtctttgcggaccccaagaatgtaacaaatgttgccatctggctttttaagtcccatattgacaatactgccatcatagggaatttgttggtcgaaaagggcgtggacttttacacgacccttcccgaagattgcgcggatatcgccaggaaattagacatatgcaccgcctttaccaatcgtcgcggcttggattgaggctgtaaaagtataagtttgctcggtcatcggtcagaactcctttaaaaaaacgtcattaaaaaaagtgaccacggcaaattcagtcgtcacttttagtgattattggaaaaagcgcattaattggcgattaaaacttgcccaccaagtgtttgggtgcaaaagggttgcaacgattgcttggcgatgttgtaagaaccagcgcttaatattttgatcagacaatttagtgatatcaaacggcatttcgaaccactcctaaactacctttattatatattagaaatgggacacgtcaaaaacaaagcattaaacttaaccaatctttaaaccggcttaaggcttaattaataagacgttggtgttagaatgaacactgatgaattgtgcaacagaaccgattaagagccgctcaaaggcgcccttaccactgacaccgagaactgttaaatcaatatgagcttcttctgggatggtaaaggctaattcacgacgtggcgaactcactttaaggatggctcgtacgttagggacaccgtgttctttagcgaattgcaccttttgatcaagatacgattgaacgaaatgtttttcagatgtcgttgtttcagcagggtaagtcatgcgtgcatttgtgtaaagggtatctggaataatttgagccacaactaattcggcattattgcgtttagcaatttcaatcgcctcactgaaagcgcgttctgataactcagaaccatctaaaccgataagaatatgctgataattaaacataaaaaagacctcctttatttaccttcaatatagcattttaaacgaagaaacgccgtaaataagcactttaaattcgataggggatagctggttgagtgactataacaatttggcaccactaatttgtgccgaccgtatcgtttactttgattgaactgcgccctataataagaatgtgaataatttctcccgaaattttttaaccactatataaaaaaagagccgtcgaatcgtagattcggcggctttctttttataaatgattaattgaaagttgtgtgacttgttgcttgttgttattggtcgtcataacggtatagcgaacttcgcgatccgtcagttgcattaatgacccaggtttcttaagtgagcggtcgaccaattcagtaatctgggttggtttggttccgatacttgttgaaaaggcgaggacgtagtttttaaacgttagattcttacctgcgttgagagctttaattgagatccccagtactttgctatcactgacgttcatggcaatcacgttgttgctgtcaacttgatcagtgcgaatgccttcaagtggattcgcttcgaaaacgcccagtcctttttgttgggcaatcggattataaatctgaataaagttcggccattgcacaatttcttttgcgacagggccttcaacataagttggattacgcatttcttcattatcagcaagtgtaatccggtactgcttagctttgtaagggacttcgaatgcgaaagcatcatcggttgttttagtcgtatgaatggtatcaccgatttgccaataaacctttttatgtttagtcttaccagtgatttgcgcattgaagccactgtttgtttcgtggagctttgctttaaccggattcccacaagcggttaaaataaaagttagacctaaaatcatgaataataatttgacgtgacgcatttctcacactcccaatcgataatagggttaactatgaatcaaaaaataaaagactccccagtcttctacttcattgtaacccatttcatctttttttcaaaatcaccatattcactatttaatactactgtaagagaatttcaacttctgaattgcgcggacatgtcgttgattattagccttgtaaacatcatcagtgtattcttggaaagttccgtttggacgggttgcaacagagacgaacgacccagtcttggataagacatctttggcataaacgagttcttggcgattgttatcagtcgcgtagtctttcattttttggtagtcaccttgaacactgacatagtaatcatcagcgtcatcgagtttaccttgtgctagtaaacgccgaccttcagcagcaacagcactatcatgatcgttataatcaacatttgcgacgttaactgttccgttttctgttaactcgccccaaactttattatacttttgagcgatgaattcagtggcaacagtcgattttttaatatgtttgatgaattggcgttcagctttatcgaattttttatctttcttttcaatcttcgctagttcttcgcggtgttctttctgagccatgtagaagttatagccaacaggagatgccgcgataatcaaaccaatcaagcaaataattagaggggctttaagccgttttttaaaaattaagaaaaataggagcaggataatgccaaatgcaaagacagcaaggcctgcataaagaacgatggcgagtattaagttcatatagtaacctccaaaacagtaatcggataatcagggttaatacggttaatcaatgaatgttatcccattttatgagatattagcaagtcaaatttacagaaaggtctgtaaaaatatgaatcttctcatgaaagggatttaaacagaaaagtcaattgtttttccttgcattttcccgtattataataggatacgtaaaaatatgaatcatttataggaggaatagtagtggacgcttctttgacaacccgtttggctgccgaatttattggaactgcaattatgattatttttggtaacggggcagtagccaacgttgaattaaaaggaacaaaaggttttagtagtgattggtttttaatcgcttttggatatggttgtggggttatgattcctgccgttatgtttgggagcatttccggtaaccatcttaatccagctgttacattaagttttgcagtgatgggcttattcccttgggaaaatgttttaccatacatcattgttcaattcttgggtgcaatggttggtcaattattattggttgctgcttacaaaccatattatgatcgcacaacaaaccaagaaggcatcttgggctcattcgtaacaatcgatgctgctcatagccggatgaatggttttgtaaatgaatttttaggcacattgatcttagttttcggtgctttagcaattggtgcaggtaagtttggcgctgccggccatattgttgttggtttattggtgatgacattagttgcttcattaggtggcccaacaggaccagctttaaatcctgctcgtgatttaggcccacgtttggtgcatatgttcacaccgcttaagaacaaaggcgactcacaatggagttacgcttgggtgccagttgttgcaccaattatcggtgccatctgtggcgcaggtattttccaaatgatttttgcataacaaaccgcttctaaaaatagtccgtcaggactattttttttgctttcaaagcaaaaaatacccggcataaaccttaattgggaaaggcctataccgagtatcttctgaatattgaaatgatcttacttgggggagtattaatcatttctgttattgaatatatcataaaataacgggagtttacaacccttttacgtgtaaaaccctaaaaaaataaattattttataataatgcatattattagtggttaggattgattgcaccgttacgcaagtatgctttgaactggcggtatattggtgcgaagacttcgatatcattttcgttgagcatttctttagggaaatagaagcgttcatcgccgctaaaacggcctgagatggcggctaccaagtcacttaatgatgataactcttcaagttgaccatcagattgtataatttcaatctgagttttgggtgatttagcggagggatcataggcgtcatacggcaaatcgaaactgttattaacagcagtgtaatactcactgttataaccagcttgctcggttagcgcccgtaattctggtaaaacacgttgggtctgttggctaaaggcaaccgatttgagtgggcggcggcttaaaaagcggtcggccaaatcattgagcactgaatccggatagtctaaccagtatagaaaataggtattcaaaacgccatcatctaattttaaatagtcttgtagggtgaagttctgttcgaaaaatggaatcaataattgcggtgcgagactctgatgatggtcaggctgttgataaagaactttcgcacgttgcaagagcttttgcaagacaacttccatgccgcgtgaaacaggatggaaataaacttgttgatacatctggaaccgactgacgatgtaatcttcaacggcatgcatcccgtttgctaaaaaggtaatgcccttatcgtaaggccgcatgactcgtaaaacacgcgtcaaatcgaattctccgtatttagtcccagtattgtaagcatcccgtaataagtaatccatgcgatcagcatcaatctggctggaaatcatctggacaacttgtggattcggataagaatgatcgattacactagcgactttcgcagggaaatcatccgcaacttgggttaagacgcgattaatggctgtctccgggttggtgataatttggcgcgtaatcaattcatgatcagtattgaagatgtgttcgaaggtatgtgaataagcgccatggccgatgtcgtgcaataaagccgcacataaggcgactaaccgttcatcatcgttccaaagtccatcaccggcaacttgactagggtagttaagttggaattgatcacagatttggcgtgtgatttcataaacacctaatgagtgggtgaagcgggaatgttcagcgccttggaaaacagaggaagtcgtgccaagctgtttaatccgccgaagacgttgaaattcgggggtgtcaattaaatcgagaatcacttgatactcgacgcgaatgtagttatgcacaggatcacggaatactttttcacgcgatagtttaatagcggtgttagtcacaatataatctcctttttgaggcccgttaaacttgataacggtggagtgctgtttggtttttaagtagaagttgttgataagctttcgtttgtaattgtggtgtgaggtcaactagttgtggttgttgaaccaaccggctaaaagcggtctgtaggtgcgtaatggctgttgcaacagtcattggtacgtttaacagatcagataggttggccatggtgtccgggatgaccgctgggaaagtccaccgcgtttggctttgtgcttggccagcagtgtaaaagctatgcatgagtttgccacgtgcctgttgattgcctgtaatgctggcgtataagagtacggtaattccgtttttggcacggcgttgggcaataccggcaaacttttgaccattgatgctgagatcgtattcgccagggcaataggagtgagtgacttcgaaatggtcaatcgtgacgggatagtctgcaaaggcagttgtgaacaattggtgcatgagcgcgtaagcggcattaatgcttaggtgatccgccatatcaggaagatagaagctgacgttcaaaacgccggcatccgtcacaatccccaaaccaccagcgttacgcacgaaatgggcatagtgtgcagcctctaatgtggcaaccgcttgtggataagcaggtaactttgtatccatcatgcccaaaataacattgtcagcaagcgtccaaaaatgaataataggttgttgtaattcgcggctcaaagctaagaggctattagcatgagcaaaagcgagtggtccagccgctttttcaaaatgttgggttaaaatagcccattcttgattggcagataaagtcgctaaatcatccatggtaatcacctccgaaaattaaaaactcttcttaattatagcgtaaattctaggcgctgtctgcaatcggtacgttggtcaaagagaattggcggattattctggcgctcaaattttgaatggcttataatagaactacttaattaaaattaaaggaagttatttatggcaagtcaaagcggaattccggtcaaggtacaccttgaaacgcaaattcaacaagatgggcaacttgaaaaacacgttttcgatgaggatggtcaagttgtcaaaatgggagagtcactttacttacgttatctggaacacggtggtgaacaagccaccgcggtacggtttaaattggctgctgacggtcaaattcaattaacgcggggcacagaagaagacgagacgcaattgcggttgtactttaagcaaggcgaagacctcggatcaatttaccaaacaaaatatggcaacatgccagtgctcacaacgacaacccatttattatcgatggtgaaggaacaaccgttatcaggtgaaattacggttcattaccaacttgccatcaataatcaagccgtgggggattacaaattacgattgatttttacagcttaagctagtatgattaaggatagactgttgaaaggacgtgtactggttgaaattagacgtttttaaaggccaaaataaagaagaactatcaatgattgaagtcgcacatgcaattttagaagaaaaaggcgacacgattgcattcgctgacttaacgaatgaaattcaaaactatttaggcaaaagtgatgaagaagtgcgtgcacgcttatcacaattttatacggatttaaatgaagatggtagtttcatttctttaggcgaaaacgtttggggcctccgttcttggtacccatatgaatctgtcgatgaagaagttaaccatccagaagatgaagaagaccaaccaactaagaagaaacgtcgtaagaaggttaatgcattcttagcagatgttaccgacgatgacgatgtgattgattacagtgacgatgatccagaagacgaagacttagatgctgatgatgatgttgatttagcagctacagatgacgttgctggtgatgacttaactgaatacaaagctgacttacaaaacatcggtgacgatgacgatgatgaagacgacgatgccttagaagacggtatcgaaggtcaattatctgaatttagcgatgatgatgaagacgacgaagacgaagatgacgagctttaattagacgtttccgattcgttgccataaaaaaagacgccaaagttaactttggcgtcttttttttgcgtttaatatttttaagctaatcctcgtcggatacccgacttacgacacactctcgttcaagaaaatggtaaaccgcgccgattaagttggcgtcttggttgaagtgacaaatttcgatgtgtggcacaggaataggggtggttgcccctgcacggcgttgccagtaacgattaatactactattgtcatcggctaaaagtgcgtcaatcgcagcgtttaattttggtagtaggtcagttcgctgactaatgccaccaccgacaccaataatctcgggcgtgtaagcaacgtttaaaaagagcatgatttccgcaagggcagcatacatctgtgtgacttcttgggtggcaatcggatccccttgatcggcaagttcgaagacggttttgccatcgattgtattggggagtttaaaattacggagggagacagtcttgccaatttggacgggtgagacttttgaattgttgagtgttttaatggcatctgcgatgaatttttcgaagttatcgattttatcagcagtggttttgagaatggtcccattttcgataatggataagccaatcccagaaccaattattgtgaataaggcgctcagatgaccttgaccaatcccagctgtcatctcggcgagtgctgcactgtcggcatcattttggagagagacgggcagaccaaggcgcgttgcaaattcagtttgaaattcaccgaggtgcaaaaatggcacataactcatgccatggatgatgccagtctgttcatctggatcgccaggacaactcaccgcaattccagttaaatgaaagtcggtcgcaaattgatcacgtaattgttcaacttcggaatagaagcgattgcgtgttagcggtgtagggaattgcgcttggttaattagttggtgtttcgtccaaatcccatatttgacggcaaaaccgccgatatctagagctagtaacgcgtcttgtagcatggtgggccatcctttcaaagtaggtcatgcaaatagtgtagcataggcgatttaaaatcggcgcagaaatgactaatttttttgcttgacgctaattgccatttcttgtattatattctttgggcgctttgcagttactttaattgcgaagccagaatcggttaacaggctccctgttcattttgaatagggagcttgtttttgtttttggttgtttcccaaaagcatgaatgtttagcgtaatgctaagaagaaaaggagaatatttatatgaccaaatatgtttttgtaacaggtggcgttgtttcttcacttggtaaaggaattgttgcggcttcacttggtcgtttgttaaagaatcgtggattaaaggtaacgattcaaaaatttgatccatacatcaacgtggatcccggtacaatgagtccttaccaacatggtgaagttttcgtaacagatgatggtactgaaactgatttagatcttggccattacgaacgttttatcgataataatttaaataaatattctaacgtgacgacaggtaaaatttattcagaagttttacgtaaagaacgtaaaggtgaataccttggcgcaactgttcaagtcattccacacatcacaaacatgattaaagaaaaaatcatgcgggctgctacaacgactgattcagatatcgtgattactgaaatcggtgggactgttggtgatattgaatcactaccattcttagaagcacttcgtcaaatgaaggcggatgttggcgcagaaaactgcatctacattcatacgacattggtcccttacttgaaggctgccggtgaaatgaagaccaaaccaacacaacacagtgttaaagaattacggagcatcgggattcaaccaaacgtcttggtttgtcggactgaaaaaccaattcctgatgacatgcggaacaagattgcccaattctgtgacgttgaaccagaagccgttgttgaatcacgcgatgctgaatcaatctacgatattccattgttattgaagaaccaaggcttagatgattttgtcttgaaccacttcaagatgacagcaccagaagctgacatgacagaatggattgatatgttacacacaatcaagaacctcgaaggcacgaagaagattgccttggttggtaaatatatcgaattgcaagatgcttacatttcagtgaacgaagcattacgccatgccggttatgcttataacaccgatgttaaagtgacaccaatccaatcagaagatattacgaaagaaaatgttgctgaaacattagctggctttgatgggattatcgtccctggtggtttcggtgatcgtggtttagaagggatgatcctttcaattcaatatgcgcgtgaaaatgatgtaccatatcttggtatttgtttagggatgcaaatggcaagtatcgaatttgcccgcaatgttgctggcattacagatgcaacaactggcgaagtacacccagaagcaaaacataaattaatcgacatcatgtcagatcaaaaagatttagaaaacatgggtgggacacaacgtcttggtttatacccatgtaaattaaaaccaggtacaaagactgctgctgcttatgataaccaaagtgttatccaacaacgtcaccgtcaccgttatgaattcaataacgaataccgtgaattgttgacagacaaagggctagtctttgccgggacttcacctgacaaccgcttagtcgaagtcattgaaattccagaaaacaaattcttcgtggcagctcaatatcacccagaattcctatcacgcccaaacaaaccagaaggcttgttcaaggcatttattggcgcaacaatgtagagtgctgactcgaacgggttggctttgaggattaacaagaaaataaggattatggcgttctttagccataatccttatttttaggttaaccggaaaaggcagttcgaggaagcacgtttcataaaagacgctactagtcatcacgacaaagtagcgtctttttgtatgccgaaaaatagttgtgaaaatggagatggtccgttttgaaaagccttacatttttagacttcgatagcccaattgaatgcgatgattagcttttactaagtatgaaaattaaaaagtaaatgttatccctaaatgccttgtaatttatgtgctgattaattattattatacatgtatgactaattatcaacggcattgagtagattgaagccgttttccaattttaaaaaataaaactaaaaacttaaaaatatcaaaagcgccttctggtttaaaccacaggagaagtgggaaactgaaggcggttcttttgttgcagagcgaacggggaaatctaaaaatgaaaaaaatgttaattcaaggtggcaatctcttatctggagaggtcacaattggcggtgcaaagaatagcacggttgcgattattcccgctgctattttggcggagtcgaaagtcgttttagactgtgtgccgcacattaaagacgtcaacagcctactatccattctagaagatatgtctgtctcatctacttttgttgatgacacggttgaaattgatccaacccacattatttcgacaccacttccaagcgggaagattcaaagtttacgcgcctcatattatttcatgggggctttattaggtcgttttggggaagcaatcgttgggcttccaggtggcgacgatattggtccacgaccaattgatcaacatattaaagggtttgaagcacttggtgcgacagtgactaataaccacggtgctatccaaattaaggcaccaaacggcttacacggtgctaaaatttatcttgatatggcatcagttggcgcaacgattaatttattattagccgctgtccgtgctgaaggacaaactgtcattgaaaatgcagcacgcgaacccgaaattgtggatatcgcgacattcttgaacaacatgggtgctaagatccgcggtgctgggactgacattatccgcattgatggggttgaacatctgtatgggcgcaatacacacaccattattcctgatcggattgaagcgggaacttatttaagtatggctgcagccatcggggatggcgtgaacgtcaagaacatcatcagtgaacacatggacgcttacctcgctaagttagaggaaatgggcgttaagatggatgttaaggaagatagtatcttcgtttatccatcacctaatttaaaaatggttcaaattaaaactatgccatatcctggctttgcaacggatttgcaacaaccactaacgccgctcttattaaaagcgcaaggtgaaggcattgtggttgataccctttatcctaaacgaacacgtcacgtcccagaattaattcggatgggtgcagatatctcaatcgaaaatgatgtgattattttacatcatgccgacaagttacaaggtgccgaagtatccgccgatgaaattcggggcggtgcttgtttaatgatcgctggcttaatggccaatggtgtgacaacgattgataacgcaagtaatattttgcggggctatgaccgcgttgttgataaactaacgggtctgggcgcaatcgtcaaaatggttgaagaataagttaaccatctattgttttttgttagcattcatgctaatatttaatggttatgtaaacaaatatctctgacatagcaaatatctcagggcaagacttaagttgtgcatctgaattgatgcagataactttagcaaaaaggagcggaaaagacatgaaacaaggtattcatccagattatcacaaggtagtatttatggattcatcaactggcttcaagttcatctcaggttcaactgctaactcagctgaaactgttgaatgggaagacggtaacacatatccattaatccgtgttgaaatttcatcagattcacatccattctacacaggtaaacaaaagtttactcaagcagatggtcgtgtcgatcgtttcaacaaaaaatatggttttgcagacaagaacgctgccaaataattattttgaaaccggggaatttttccctggtttttttttgcctttttttccataaaaatagccaattgcaaacggcaatcagctatttaatcaacattttttgaattcgatgactagcgagacacgctagcaaaatgactgggaaaaattgaatcgggaaaagaaagagtaacaaagtagcagtgacgtacggttgcgccacgatcaccgtacaactgacagcgacaaccgtggcaaccaggaggccgggagtgtatggcaatacaacggcgagacttaaaccgattgccgcacttgcaaagatggctgggaaaattttaccgccccgccaaccaaaggcaaatagcagattagttagaacggtttttccaagtccgattaagagtaaataaatgaatgattgatctaaaccggatttggtaaaggtgaacaagtagtgttctccagaaaagagtaaataaggcgacaatagaccacaagcacccaagaacacaccagcagctatcattgcaagtaagaccggccgctgaatcgtatcaaagagccactggcaccattgttctatttttaagaatagattgccaaaaactcaaccgacaattaatgctaaaataagaagtggccaaactattaatgtccaatgaatgattggtgtgtgcagtgtaaatggactttctttggggaagagttggttgaccaaggcgaaaccaagaatcccagttgcggttgtgagaatgtataatagaacttgattgaagtgtgatttgaaatgatcgcgcaaggaggttgtctcaatcgcctcaccaacaccggctagcggtgcgtggaagatggccgctagcatggcaccaatccccatcgtcaaaaacgtttctttagtttaagtcgatcgcccaaccaagtgattaggccgccgacgttggtcgagagcgcggcttcagggccaaggctagcgccgcaggctaatacaactaaggcggcgataatgtttttaccgacttgctgttggtaggcaacggacccggtttgtttaaattcgctgagtgtttcatgcattgttttaggataaggcccccaataacgttgcattaagccgacgagtaatccgccaaatagaccaacaagcaacggataaaatggctggttgaaatgcgaataaccgacttgccaaattaagtgtgtactgaaattaatgagggctaaaaaggcggccgctatgccaccaatcaacaatcctaaaagtaagctatataaaacaaaaataattttaaactgcgtggttttagtggtaggtgatgacatagagcctcctagttaagggaattatttatgaactattatgcactacccacgctagtttgaccatagtcgaattgtgagggaaagaataatgaaaatcgatcgattacaagcatttagcgatggcgtttttgccattttattaacactattagtgttagactttaaagtgccggactatcaagcagggcatttgagtcaagcggtgattgcacagtggccaactttggctgcctatgtactatcctttttttatgtggggacattatggttgtttcatcacgattattttgcgaaaataaaacaaactaactggcagttaaacgtgatcaatctcagtattttatttgcagtgacactgattaattacccaactagtttgttgtcggaatcgattgctcaacaaaatggcgctgatattcgatttgcttttacatcgtatgcgattgttgcattagtcatctcagctttgttttgggtattatatcggtatatggcactgcatcatgaactaatgcgtcagtatgaacagcgacacgaggaattttatcaaacgattaaaaatgatcccttacgaagtgtcttgatttacgccattgccattgtcggaattcagattaatagctggctaggggcactgttgattttgctgggcaatatctttcatttcatcgcatacttgcgacttagtcggagtgtcacgctgtatcatttgaatggaaaggatgaataacatggcaaaacaaaaaacaaattggcggtgggtagattggctttatgtcttcaccattgtgagtcaattaatctatattggttattacttagaacaaatgctgactaaccccaaagacaacggaacattgtcttttgccgttttacaagtggttgcaggcctggtgattgcgaccttacctattatcattgaacgctttatgccataccggtttccagagattctatatgcagtttatttaatctttgtatactgttcgattttattggggacgggattacatttttatagtcgcttatactactgggataaattcttgcatgtcttgagtgccgggttattggcgggcttagggtatacggtctttaacgtattgatttcaaaacaactccgtcaaaccatttcagccttactcatgagtttgtttgcggcaacgtttgggagtacgattggtgtgttgtgggaattctatgaatttaccggcgatagtttgttaggcttaaacatgcaacgttatatggcaaaaggtcaccttttattaggccaagcagccttgttagacacgatgggggacttactagcggatgtcttgggatcatgtttaatcgccattatcggctatttctgtattaaacataaccgggactggttagataaactgatgtttaccaaaaaatagagtgcgtttgtggcgcttatattttgagcattaactggatttgacgaattggcgattgtaatcaccgatttggcaaattctgttaagcgcagaaatatgccacaaaaagcacgtttcaacaaaaaagtggtgtcgctctgaaaatgagcgacaccacttttttgtattatttttgtatttcatgttcttcgcgtaagacttttgtattctgacgcacccagaagaggttgacgattactaaaacggttgtcgataggaaaaccccgctgtaaccgaataggccagaaacgctggaaccaattaaaggtccggcgacattccccattgcttggaaggattggttataactgaaaatccgtccggcggaactatggggtgagtacttcgcaagaatcgtttgaacttgcggtaacaatgcggcatcggcgaccccaaccagcagacgcagggcaccgagttgccaaacattttgaacgaaagcttgcggaacgtaaacgaagacggcgaagatcaagccaccgagtaaaattttctcggaaccgatccgatcgccaagtgcaccaaaacgcggcgcggcaattaaggttgcgatccctggagtagccgcgacaactccgctgactaacgctacgttattgccatgatgcattaattgacggacatataaactcaacagcgggctaattgagttgttggaggcttgaataatcattgtggtgacgaacatgccgataattaaatgcgggtatttcaattcatgaatcagttgccgaccgggtacttgatcgcctttttctactggcgtgaagtcttcgtgaacgaaaaccagacagaggataaagacgatgaacaagatggtaccggtaatgaagaaggttgttcgatagccggttgcttgggcgataatcccacccaacaacgggcctaataaggttccggaaacacttccggtggtcagggtgcctaaagcttgaccacttttttcttgtggtgctgaagtggcaattaaggcgtttgaattactgatataacccgagaagaagccttgtaatagtcgcaaaccaattaattcataaatattttggactaagcccatcgcacccaggacaatcgctagtcctaatgaggcgcggagtaacattaatttgcgaccacggcggtcagcaattttgccccaccatggtgaaatcagagcggtaaccaagaaggtaatagaataggtcaccccactccataaactcagttgggccgttgtaaagttgccaagtgtgtcaatgtataacgacataaatggcataatcaaactaaaagcaaccccggccatgaaattaccaaaccataaaacgacgaggttctgttcccattgtgcgcggcgtctgaataaacgttgacgaatgttagtcaacatggtgtcatcatctcgattctaaaaagttaaagcggcgaccacgcttgctgatgtgcgtggtaggcgtcttttaagtgtgggagttgttcaaagagggcagtcagttgcgcatctttagcgcgtggcagctggcgtttaaagtacaaccgctgagtgtcgtaggcagtcaatgcgcttgcttgttgggctggtgtaccatgttcggcaaaatagagtagccaatcaaacagccattctttatcagcatcggcttcataacgggctagcaaagtgtctagctgtgctccctgtgccactaacaagtaatggttacgctgcaaaggggttaactcattatctggatttagatcaattactttgggacctaattgttcgagaaaactatccagcgaatcagcaacggttaaccattgatcgacctcagtatctatgtagcgaatcggtggttcagctgaggcttgttggcaatcaaatacaaagtactgctgttgatgctgactaaaagggactaagtaatcgggcaagtcgggggcttggatgactgcttcaccgttgtgagcaatcccagctaaataatgacactcaacgtcggcgagaccatcacttgttggctcactcgtaggaaggctaaagttagtcaaaaaaccgccattggttgtttgacaaagtgcctgataactcatgggaatccgagggtcatcgacaatcatccgtggtgcagttaaatcaacattcgcaattgctggctgtgcagtaaacatgcaagtatccctcccaaaattggtaactctttaattttaccatttatgtcaaaccaaggttttgttaaggttggcaacctattctttatttgttgtagcgagtctgataatatgaagacaacattaaagaaaagaggatacgcgtatgttgtggtttattattatcattattttgttagtggttggcgcggttggcttctatatcagcacctacaataacatggtcaagagtcggaactggacagatgaagcatggagccaaatcgatgtacaactcaaacggcggaatgacttgattccaaacttagtatcgaccgtgaaaggttatgctaagcatgaacaagacacgttggaaaaagtcatcaagatgcggaatcaattggttgaaatgccagctgataatcggcaagcaacaatggaggcttctaatcaattaacggattcattgaaaagcgttttcgccttgtcagaaagctatccagatttaaaagcggacgcagaatttacgaagttaatggaagaattgacgaatacggaaaataaaattgcgtatgcacgtcaattgtttaactcaagtgctacccgttacaacaaccaaattcaaactttccctggtaatattttggcaggtgctcacaatttccaaaagacagcttacttagaaacgccagttgaggaaaaagcagcacctaaagtttcctttgaatagggtgtgattgggaatgttatttgaacaaattcaacagaacaaacgtaaaacggtatatgtgatgattggcttttttgctttagtattggcaattggggctgcattagggtatctgtttatgcgtaatttgattagtggtgtcgtggtggcggctattttagccgccgtttatatggcgatgatgattggaaactcaaccaacgttgttatgcagatgaatcatgcgaccgaagtccatgatgctagcgaatatcctgatttatggcacattgttgaagacatggcgatggtcgcccaagtaccgataccccgggttttcattgttgacgatcctagcccaaacgcgtttgcaacgggcaatgatccacaacatgctgcagtggcagttacgactggcatcatggcgcgtttgaatcgggaggaacttgagggggtaattgctcacgaagtctcccatattcgcaattacgatattcggttacaaacgattgccttggcactttctgcggtgatttcaatgctcgtgaacatcggcagcaacatgttatggtggggcggcggccgcagtcgtgataacgaccgtgaagaaggtgcaagtaatatcatcggtttggttttttcgatcctattgttgatattgggacctttggcggctagtattgcacagatggcgttgtcgcgaaatcgggaatacttggctgatgcatctggtgtcgaattaacgcggaacccacaaggtttgatcaatgcgttattgaagatttctgacagtgagccaatgcaagctgcggatccatcaagcgcagctttgtatatctcagatccatttaaaggacttagtcggtcgggtgctcatttatttgatagtcatccaccgattgaagaacgagtcgctaaattaagagcgatgtaatgttttaaagacataacgcatcagctgtaggtaatagttgatagaacacgttttatatagagggaggcaaaattcatttttgtccctctctttttttgtataataaaggaaaagaggagtgatcagtgtgcgattatccccaatccagcagttaatggcgttacaatctactctaataatgcaattgaatgagacaccgagcaaacagattaccatgattgatttaccggttgtgcgtggacaattattattggcattgcatgcgcgtcaccagctaacattatcgacgcaacaacgcacaatgattcaacgcgccatcatcacaacgttggcaactaaaacggatggcactcaattaatggatctttggcggcaaacactaccgcagcggtatcggattgttgatcaggcagaggtggtggcccattttgaacagttagaacgcgctaattgggacgttgcgagtttacgcgcttatgcaacccatttaacgggacaacttgctgcgcaaccaacagcgcttaaaaggattttgcaacacaattggcaagcattacatcaagtaggctcagcactttatcaaatgctttttgaagcatacggggaccgaactgcacaaccagtaattaattaccagcggatcaatttagtgctcacgcatttaggggcgcagttggatgagcatgcgtttttgcaattaacagcacgtgattatcaacttgacccgcaattagcaccagatgcgccttttttagcaacctttgcgcaaagtgtgcaacgtgcatttgttggtcgagttttaaccgataaacggattcatcaattcagaatgtatttagatcggcagaatctacgctatatccgccattattttcaacactctggtgaaacagatgaacaagccttagcgcggtttgtacgaaaacgacaagcgacccagccacattattggctgcggcgtgaaccagctcggctccataataaataccgcaacggacagcgcccaacaacgcattggaatcgaaaacgactcacgccggattttcatagtgaatttattctagcaccatctggagcatttatcagtcaatggcaagtgcttaaagtaaaggctgatggtctgattgatagtaatcctgaccattaccagctagatgatggcacactccggcaactactaaacggtgaatcgtttaattatgctaatcggaatgatcggcaacacgcccggttagatagccaaccaccgctgcaaaatgatcatgcactacgcaaaacagcttttaaagggtggcggagtccgactaagcaacaatatcgaccaaatgataaacaggttgatgactattcacggtggtactcttaattggtggtcaatcatttttggggcttttttgaaactatggtacaatattgcgtagtattttaagccataactaaaaaaagcgtgcgtaaaaatgcacacagagtaataggagttattgagatatgaaaatgcagttgggtgaaattgcacgagtcactggggctaaaaacgatattgaacaatgggcaaccattgaagtgacgaatgttgcgtttgacgcacgtcaattaaatgcgggcgctttgtttgtaccgttagctggtatgcgtgatggtcacgactttgttggacaagctaaggaaaatggggcagtggcaactttttgggctgccaatcatgatgcacagccaactgattttcctgtattagtggttacagacccactagcggcttatcagaagttagccatgcattatctccaaaaaattaatcccaaagtggttgcgattaccggtagtaatggtaaaacaacgacgaaagatatgacagctgctgttttaggtagtcagtacaatatgcacaagacacaagctaactttaataatgaaattggtgtgccacaaacgattttatcgatggaagctaatactgaaattttagtgattgagatggggatggatcgcccaggtcaattaaaagcgctcagtgaattagccatgccagatgtcgcagtcattacgatgatcggggaagcccatatcgaatttttcaagacgcgtgataagattgccgatgctaagatggaaatcacagatgggctcaaagaagatggtctattaatttacgctggcgacgaaccgctattgactgaacgggttggcgaactcacaaccgagacattcggtaatttgacgaccaatgacttatatcccttacaagtccgtgcaggtgaaactgaaacgtcattcaagttgaatgcttggccagagatgacgtttacgattccaatgatgggtgcttataatgtcaataatgcgttggccgcaattttggttgggcaacggttccatattaaaccagaattaatgaaaaaagccttggcgaattttgaagtcacaagtaatcggacagagtggcttgttggtcaaaagggtgaacggatgttgagtgatgtttacaattcaaacccaacggctgccaaagaagttttacacaatttcagccattttgagactgacgggcggcggattgccgtcttaggcgacatgttggaacttggtactgccagcaagaaattacacgaaagtttggcccaagaattagatcccacgatgattcaagaggtcttcttgttcggggatgaaattgaaccattatatgtgacgttaaaagagcgttatgcaccagaacgcctccattactttaaccgccatgaacaaacgcaattaattgctggcttgcaagcgcaggtacaacctgatgatttaatcgttttaaaggcaagtcatggcttacatttagaaaaagtagtcgctgctttacaagatactgaagttaattaatgattagcaattgacagacaactgcacaggcacgctgtttagcgattgaagctatggaattagattaacaattggagcaattccgtttgctaattaagttgtggcatgataagctattaaggagcttttttaatgaaaaaggcttttgaaaacaattatattacaagacagatttttgaaaatggtgcaattgacgaagtggacctgttttgtaatggcatgttttttacaaaacaaggaggaacactatttgaaattcgcagaattaggtttatcagaaccaattatgaaagccatcgaacgcgctggctttgaagaagcaacacccatccaaggcgaaacaatcccattggcattagctggtaaggatgttatcggtcaagcacaaactggtaccggtaagacagccgcttttggtttaccaatcttacaaaacttagacttagacaatcctaacattcaagcattgatcatttcaccaacgcgtgaattggcaatccaaacacaagaagaactctatcgcttaggtcgcgaccgtaaagcgaaagtacaagttgtatacggtggggctgacattcgtcgccaaatccgctcattaaaagatcacccacaaattcttgttgggacaccgggtcgtttattggatcatatcaaccgtcgcacagttaaattagaccacgtgaaaacattggtcttagatgaagctgacgaaatgttagacatgggcttcgttgatgatatcgaaagcatcatcaaacaagtgccagaccaacgtcaaacacttttattctcagcaacattaccagcaccaatcatgaaaatcggtaagagcttcatgactaaccctgaaatgatcaaagtaaagtcaaaagaattaacggctgacttaattgatcaatactatgtgcgggcaaaggacttcgaaaaattcgacattatgacgcgtttattcgatgttcaatcacctgaattaacattaatctttggtcggacaaaacggcgtgttgatgaattaacacgcggtttgaaggctcgtggttacaatgctgaagggattcacggtgatttatcacaacaaaaacggatgagcgtcttgaaatcatttaaggctggccgtttagatatcttagtggcaacagacgttgctgctcgtggtcttgatatctcaggtgtgacccatgtttataactacgatattcctcaagatcctgatagttatgttcaccggattggccggacaggtcgtgccggtaagtcaggcgtttcagttacttttgtaacaccaaacgaaatggaatacttacacatcatcgaaaacttaacgaagaaacggatgttaccattacaaccacctacagaaaaagaagccttcaagggccaattagctgcagcggttgcagacatcaactcaatgattgaaaaaggccaattggctaaattcagcgaagaagctgaagaattattgaaacaattctctgacgttgaattagcttcagtgcttttgaagacaatcagcaaggaatcagttcctgttaagataacaccagaacgtccattgccttcacgtaaaaaaggtggcaatcgtagcggcaaccggaatggcggcggcaatcgtcgtggcggtaacggtggcggctatcgcggtggcaatcgtcgtggtaatggcgatggcaaacgtcgtggtaatgacaacaaagacggtcgtcgcaacagtggcaacggcgatagcagcaaacgtcgtagcaatgacaatcgtgacaaccgtaagaagactgatggccgttcaaaacggaacttcacaattcgtacaaacgataaataagactttttaaaaacagcgggcggccaacttggtcggccgctgttttcatatagtcaattgtgacagagatgtaagttcagtctctgtcttttttgtggtaaactaattaaaaatagggtactaggggcgaagacgatgattgctggattaggcattgatttagccgaaattgatcgatttgaaaaagcacagagtaagaatagtcattttgctgaaaaagtattaacagctaaggaatatgaactgtttaaacggtatacggggcgccgtgcgttagaatttttagcggggcgctttgcagtgaaggaagcttttagtaaagcttatgggactggtattggacaggtacaactgcaagcgattgaaacgttaaatgatgcaaagggcaaaccctacatcaaacaagatttatttgagggaactgtccacgtatcactttcgcatacaacgacgttagtgatggcagaagttattttggaaagaggttgagacgatgacagtcggctacttacgaccaacacgcattctagttgatcaaaacgcaatttatgaaaatattcaaaatgaactaaaggatttaaaaggcacagatgcagtgattttccctgtcttaaaagcaaatgcttatgggcatggcatgattcctgttgcagaagcggcccaagcggctggtgctgcaggattttgtgtggctattttagatgaggccttagctttacggcgtgctaactttacggaacccattttggtgctagggattacacagcccaccgaaatcgaattggtgattgccaaccaaatctccattacggtcggctcactcgaatggttgcaagctgcttacgaaattgcccaacaaataccttatccacaaccaatgcacattcatttgagtgtggatagtggtatggggcgaattggttttagaaatgcgactgaattactagcagcagccacatttatcaaagcacatgcgaaatattttgatttagaagggatttttacccatttcgcaactgcggatgatcccgatgatacttattttaaagaacaaagtgcccggtttaatgaactagtagccgtgttaccagaatgtccacgatttgtgcatgtttcgaattcagccacgagtttatggcactcagcttgcaatgagaatttaattcgaatgggaattagtatgtacggattgaatccttcagggaatgcgattcctgaattgccttatgcattgaaaccggcgctaagtcttgaatcagaattggtctttgttaagcaagttgaagccggaagtaagattggttacggtgcgacttatgaagcgagtgaatctgaatggattgggacgattccaatcggttacgccgatggttggtctagacggatgcaaggctcaaccgttttggtggatggacatcggtgtgaaattgtcggtcgggtctgcatggatcaattgatgattcggttacctaagcaatatccagtggggaccaaagtagtttttgttggtaaaagtggtgatgacgaaattactttacaagagatcgcagattatgcagggacgattcactatgaaattatctgtggtttatctgatcggttaccacgggtttacagtggaattgatgaacattaaggattgagaatttgattatcgccagttctgtggtaggatgaataaaggttaaagtgttgattcggaggttgatgcagatgaaagctaaccgtgaacaattatccgttaaattagacgttgagttggtccaagcaattaagcagtattgtgaggtgtatgcccttgatgagaatgatttgattcaagatgcgcttcacgaattcatggcgaccagacagtcaaaagtagataacgtcattaacgggtacgctgagatggctagcatcaacagtcaaattgcggctgaatttaacgcttgcgaaagtgaggcgtacgcacacattcgcgtagttgattgatcctaattggagggagaacaagtgggagaattaatacagcgtggcgatattttttatgcggatttatcaccagtggtcggttcagaacaagggggcatgcgtcctgttttaatcattcaaaatgatgtgggtaatcaccatagtccaaccgtaatcgttgccgcgattacagcaaagattcaaaaaccgaaattaccaacacacgttgggattacggccaaggataatggtgttgaacgcgactccgtgattttattagaacaggtacgaacgattgataaacaacgcttgaaagatcgcgtcacacatttagtggcggataagatggcacaagtcgatcgggcgctcaccattagtgttggacttaaagcggtcttaaatccttaatacataaataccaaaaagaaagaatgaagagaacccgcttataaaagcgggttctcttttttttgacctttatcaacagccggtaaatatgatatgatggtagctgttcgaaaaaacgtggttcgtaaccatcccacgcaaaaaaactaggaggattcaaagatgacgaatcaaagtcgattaaaaacggtgattctaaacgggttagtggcagcattatacgttgttttatcgttattcccaggtatgttgggatttgcttcaggagccattcaatttagaatttcggaaggcttaaaccatttagtggtcttcaataagaaatatctatggggtgttttcggtggggtattagtgttcaatttctttttcagttctgaaaacaagttactcgatacgctttttggtggcgggcaaactttattggcgctgcttgtattaacgcttgtgatgccctatttaaaacaaacttggcaaaaaatggtggtcaatattctcttgttcaccgtttcgatgtgtatgattgcgtggatgattgtgttaaccggttctactgctagcacacacattccattctggccaacgtatatttcgttggcactttcagaagcagtcatcatggtgattaccgcaccagtaatgtatgctgtggataaagttgtgcactttgatgcacaaatgaaatcataaagattaaaaagggcagtcctaattaggactgcccttttttgcgttaaactaaatcatcaagtttggagtcatcacggagcgccttatcagattgtaaatcatcgatttcaggaacacgatagccttttttctcgagcttataaacaatctttttcaaaatctcaagatcaagtccagcaggcaaggtgaaaagggtgcgtcgtacgaattcatcttgcttagcatctaaggtgatgcagctggcgattgaggtatatttagcgataatcttcgacatggcaaccaaatcaccttgttcaccagaagaaagcacagtgagtacatagctacttaattcgagattccacgcttcagaaagcatatttaataacgtgctatgcgtgagaattccgtaaaaattgctatcttcgtctaatacggcgatgtatggcaaatctttaatgttgaagaatactttgaaaaacggtgcgtcaactggaatatacttggtcatattcttcaataagctggtcacgggaagctgcatatcgcccccttgagacttatgacggtagatgtgcatcttatagatgttaccgcggaagatcttgccgctagcatctaggacgggcacacaacggtaaccagactcttctagtagctgtaatgcttcttctaaggtcaccgattcaacaattgtggtgagacgttctttaggtaaaactagggatttaatgagcataggctttctccttagattaaaattctctcatatactaatgtaatcatagcataccaccaagcagattaaaataactagtttttcgactcagcgaaaacttgattagtaatcgatgagaaagaacgtgaaatctaagcaataaaaaagcagggataaaagttaattttattcctactttgtatttaatcgttgagcttactttttctaaacgaattctgtaggtcagctacctctggttaatccgtagaggagaggtgttgctagtacactacgtctaaatcactacaactggaatgccttcgctaacagtatcgtagagtttagccattgtgccaggtggggtattgatacagccgtgtgagccgtgttctttataccagtcaccaccgtacttaggttgccatggcgaatcatgaatcccaacgccagtttcatcgattggcatccagtaattaactgggcttgcgtattcgctgaccccatcaaagttcttccccttcaatgtggcattgcgttctttcttccaaacgctccaaacaccggttggggtgacttgtggtggacgtgctgaaacgatatcagtgtcaattgtgaccttaccatcttgataaagccacatatgttgggcttttaaatcaatttcgatgtaggttgaaccgacactacgcgttttctgatcagttccggaaccacggataacagctgttcttgagaaatctttgcccttaggcacttctgtcattaaggcgtggatttcatcggcaggagagatactccacccataaattccagctgggacagtgactgtgccttcttttgtagaattgaaggtcaaatctttgtcaaaagtatcatactttgcctttaattgataaacgtatttggtaacggcagctttatctagactaattgtaccgttgttatacgttaaccaactttggatgtcttctttaggaacttggaaatcattaccattaactgaatagctgattttttcattagcaatcgtcttcaattgatcggcagtttttttcaattgcttgtccgtagatttcacttcaggttgcgcataatcgttttttaagtcgattgttgcttgaccttggttaataccgtgggcaactgcttttttgaacttagcggcatcaattgtgttcccgtagacttcttttacgagatcgaactgatgattctcgaggttaatatgggcattctctgaaggtttgcgatcagcgttgaccttttcgagggtttccgttgagaatttgtcaaaatcagcggcatttaaaatgagtgcgtcttctgatttagttgtttgttcactggcaaaaacgtggactagccaagaccaaccgttttggctttttttaatcttttccaataacggtttaaaattatggctaaagccagcttcttgaccgctaaaagttagcaatgtttgattgttatcctttagcgtatatttttgacgattcactttttttaagagttctgtgttagcgtctgcgactgattggccactaatgttgacaccggcaacggtcgtatgtggcaagaatgctttttgataatgaagactgactgccgagtaacctccaacaaggataacggctgctacgccaagggcgacgtaggctttcttcgtaagtttcacaacctcaactccaatctctgcataggttaatcataccccagtatcacataaaatacaaaggcgttaactaatagttagcatacaagatatgcacccaaaaagaaataaaaaagtattatttttcataaaaaatatgtagttgataatattaacaccataaaaaaacgactctcatttaatgagagtcgtttgaccaacagcaaagagcttattggcgagtttcgatatctaattcagcaaatgcttttgtaacgatatcttttaattgttttgcagaacggtgcatgctttccatttcgtggtctgtcaatggaatttcaaggatgcttgtgatacctgagcggttaataacagcaggtgaaccgataaagatatcgttcaagccgtattggccttccatgtatacagataatggtaagacagcattttcgtcgtctaagatagccttagtaatacgagctaatgcagtaccgataccgtagaatgtagcaccttttaagttaatgattgtgtaagcagcgtcacgaacactttcgaagatcttaacaagttcttcttctttaatttctggatgagctttaacccattcagaaatcttgataccaccgatgttagcgtgtgaccatacagggaattctgtatcaccatgttcacccatgatataagcatggaccgaacgtgcgtcaacgttaaccatttcagcgatgtctttacggaaacgagctgagtcaagtgatgtacctgaaccgataacgcgttctttagggaaacctgataatttccatgtagcgtatgtcaagatatcaactgggttagcagcaactaagaagataccgttaaagccagattcaacgattgggtcaacgattgtcttcaagattttaaggtttttacttactaagtctaaacgtgtttcacctggtttttgtggtgcgccagctgtgataacaacaacgtcagcatcttttgcatctgagtattcagcagcatagattttcttaggagaagtgaaagctaatgcatcagataaatcgattgcatcaccttgtgttttttctttaaagatatctacgataccaacttcttgtgcaataccttgtaaagttaatgcataagcgtaactagaacctacagcgccgtcgccgacgaggataactttttggtgatctttttcaatgtttgccaatataatgacgtcctttctgtaaatcaattcttcatttcgaaaaccagtatagcataatttacaccaaagttcgcgatttttggttaaattttcagaaaactatttctttcacaaagagagaaataaactgaatatggtataatggttcttaatatcaactggcgactggggagaattaactgctcagaatttttgcgtgatagcgccagtcaaaaagaggacgttaataatgaaaatgattgttggcttgggaaacccaggcagtaagtatgcaaagacaaaacacaacattggttttatggtgattgatcaattatgcgaacggtttaatgtgaccttaaacaagcatgattttgaagctgaatacgggagctttaaatatgaaggggaaacgattttcttagtgaaaccactaacgtttatgaatgattccggtcgttcagtcgggcctttaatgaaatactaccaagttaacctagatgaattagtagttatccaagatgatatggacttaacgctaggcaagttgcgcttacggcaaaaaggttcagcgggaggccacaacggcattaagagtatcatcgcaagtgtccaaagctcagaatttaagcgtgtcaaagttgggattcaacatccacaaaaaagtacagtcgttaactgggtcttaacgccgtttgacaaagacagcgcaccaattatcaatcaagcactagaccaggcatgcgaagcactagaagactggtgccaaaacgacgacttcatgaaaacgatgaataagtttaattagagtgtcgttggcagttggtcagattctgagcatttgcctaacttggcgaattgacgctgcaagcggcgatttgaaaagtgtagcaaagcgcaggaatctactgccaatgacacgtttcaaaaacagagtgcgtttggttgcggttagcaacagagcacgtttcttcgcgccattataataagaaagtaaaggaacttttacatggatttaaggacaatgctggggcagaccaaacaggtgcaatccgttttaaagaatcaacgaccagggattaaacaactacttacagggctttcgggatcagcgaaaaccctgtttttggcgacgatttataaacaacaacccttattgattattgagagtaatacgttccaagccaatcaagttgctgatgatttgagtaatttactcaatagtgatcagatttacactttcccagttgaagaagtgatggcggctgaaatggcagttagttcacctgagtccagagcggaacgtgtgcgaacgttgagttttttagcaacaggcaaaaaaggaattgtgattacatcggtcgcgggcatgcggcggttattacctacagcgcgtcagtggcaagatagtcaactcacaatcaataccgatagtgaagttgatccccaggcacttgctgcgcaacttggtgaaatgggttatttccgagataagttggttggtaaacctggtgagttcgcaatgcggggggatattattgacatttttccactggatgcggaaaatccggtccggattgaactctttgatactgaagtggattcactgcgttcttttgaagcagatacgcaacggagtattgagaatttagatagtgttcaaattatgccggcgactgacttattggccaacacagcacaattggaaatggctggtgaggcattacaagcagcttatgaggcggttgcggccaaaataacggataaaactgaacaaaaacaattggcgacaaactttgaaacaccgattgaacggttgttggccggtgaacgcgttgagaatttagcgttgtttgttgattatctgtatccagatcaatcaagtctgattgattactttaaaaagagtggcttagtgatttttgatgactatccgcgcattttagaaacgcagcggattttgactgaagaagcggccaactggcaaaccgatatgttggaaacccaccgcatgttgccagaccaacgactcatgatggatgcccaagcgctcatcaaaaaagatacacatgcgcatctctatctatcactgttccaaaagggaatggggaagttaaaactcgatgcactcaacaatttacccacgcggacggtgcaacaattctttagccaaatgccgcttttgaaaaccgagattgcgcattggcaaaagcaaaaacaaacggtcattgtgctcgtgtctgatcctaaacgggtcaagaagattgatcagacgttccacgactttgaaattgatgccgtcatcgccaataagactcagttggagacggggcggacacaaatcattcaagggtcacttcaaaatggctttgaattaccggatttaaaactggtggtcttaactgaaaaggaactgttcaatacggcgccgaagaaaaaagtccggcggcaaaccttggccaatgcagaacggttaaagagttataacgaattaaaaccaggtgattacgtggtccacgtcaatcatgggattggcgaatacgtcggcatggaaaccttggaagtcgatggggttcatcaagactacatcaccatcttgtatcgggataatgggaagttatttatcccagtcactcaactcaatatggtgcaaaaatacgtctctgccgaggccaaaacaccgaagattaataagcttggcggtggcgagtggcaaaagactaagagtaaagtttcggcaaagattgaagatatcgccgatgatttaatcgaactttatgcgcaacgggaggctgaaaagggatttgcctttccaaaagatgatcaattacaggctgaatttgaaggccagttcccctatcctgaaacagatgatcaattacgcagtaccgctgaaatcaagcatgatatggaacgcgtccgtccaatggatcgattattagtcggcgacgttggctttgggaaaacggaagtcgctttgcgggcggcttttaaggctgttgaagccggtaaacaggtggcctttttagtgccaacaacgattctggcgcaacaacattatgaaaacatgctgacacgcttcgcggattttgcggtcgaaattggtttactgtcacggtttaaaacgcgcaaagaagtgacggcaacgctcaaaggcttagcagagggcaaagtcgacatcgtgattggcacccaccgcttgttatcgcaagacatcaagtttaaagatcttggcttgttgattgtcgatgaagagcaacgctttggtgtaaaacacaaagaacgacttaagcagttgaaggcacaagttgacgtgttaacgttgacggcaacgccgattccacggacgttacacatgtcgatgctcggtgtgcgtgatttatctgtgattgaaacgccaccgactaaccgctatcctatccaaacgtatgtcatggaacaaaatgccggtgcgatgcgcgaagcgattgaacgggaattagaacggaatggtcaagtgttttacctccataatcgagtgagtgacattgaacgcacggtcgatgagattcaagcgctggttcctgaagcaacggttgggttcgcacatggtcagatgaccgaggcacaactagaaggtgtcatctacgactttgtccaaggtaaatacgacgtcttggtgacaaccacgattattgaaaccggggttgacatgcctaacgtcaatacgatgattgttgaagatgctgatcattacggtctttcacagctctatcaattacgcggccggattggacgtagtagccggattgcttacggttactttatgtataaacccgataaggttttaacggaagttagtgagaaacgacttcaggccatcaaggactttaccgaattagggtccgggtttaaaattgcgatgcgtgatttatcgattcggggagctggtaatttattaggtaagcaacaacatggttttatcgattctgttgggtttgacctatactcgcaaatgttgggtgaggccgtcgctaagaaacaagggaagcaagtcgttgctaaaacgaatgccgaaattgatcttaaactagaagcttacttaccagacgcgtatattaatgatcaacgccaaaaaattgaaatttataaacggattcgccagatggattcagaagcggcctttgatgaaattcaggccgatttaattgaccggttcggtgattatccagatcaagtcgctaatttattagcgattggtcagttgaagatgaatgcagatgacgcgttaatcgaaaccatcaaacaaacgaaagaaatcattcaagtcaccttatcggcgaagggcagtcgccttgtttcaggtgaacaaatttttgaagcgttatcgacaacccgcttgaaagcaacggtcgggtttgaacaagaacaattaagcgtgaaactcgtaatccagccgaagatgcaaccggcagattggttgagtgaagtggcaacttttgttacaagtctcttgaagatagaacaaaagcacacggaacaaccaacggattaggcacgctaagtggaggccaggcatgcaaaataaacagatgcaacatctgatgaaaggcgcggtcattttatcaattgcgtcgtttatcgcgaaggtattaagtgccgtttatcggattccatttcaaaatatggtcggtaacaccggcttttacgtgtatcaacaagtctatccaatctatggcattggcatgacgtttgcacttagtggctttccagtttatatttcgaaactggttgctgaacaagtcaatccggaggaacaaacgcagctgttaagacgctcatttgcactgttaggcatctttggtgctgcaatcttcatttatttacagtatcaagcgccgaaaattgcgggggcgatggcggatccagcattaacaccgctgattgaaatggtatcgtttatgtttttattgatgccgtttctagcggtgacgcgggggtacttccaaggaattttcaatatggtaccgacggcggtttcacaagttgctgagcaactcgtgcgggtcgtggtcatcttggcggcagcgtggctatctttgaaactgcactggtcagtgtatgaaatgggcacatgggcgatatcaggcgccttctttggcggcttggttgcaacctatattttattacggccagcagaaaccgcctttcaactcaaggcgccacaccgtggtggcatcgattttaaggcgtatcaacaattggcaaaacgcttagcgattgaaggcgggtcaatttgcctctttgcttcattaattgtgttattacagctggttgattccttcacagttaaaaaagggttggtcctcagtggattatcggaagaacttgctaagaatatgaaggggatttttgaccgtgggcaaccacttgtccagctgggattagtcgtgtcacttgccttctcatcaacgttgattccgagtctgtcacaagcgcggcaacggcggcaacaatatcaatttcaacaagttgctgaagcgctgattcatatcagtttaggtttatcggcagcagcaaccaccggcctaatggttttgatgccgcagattaattatttcttattcggggatgctgatggtaatcaggcattggtttggtatatgttgagtatcgcaatcatcgcgctgatcaatgcttgcaactcggtgctccaaagtcttgatcagttccataaaacaacggcagccttaattgttgggttaatcgttaaagtagcaatcaatcaatggcttgtgcaacactatcaaattgttggcgcgagtgtcgggactgttatcagcctcggtgttgtgttagccttaattttacggcaatcaccagtgattgtacggcaagcgcttggtttgcaacgctttaccggtaagttacttgcgatttgtgcagtgatgtggctgggtgttaagattgcgctacagtttgcaccacaatcacttagttccagaggacatgcgattttagggacgggccttggcgtactcgttggtgtgctcctatttggcggattagcattacggtggcaattattctcgattcgagaatggctgacgatgccaggtggccggcaactattgcgcctttcgaaaaaaataaaaggtaggacaaaataatgcgcttagataaatttttgaaagtatcacgaatcattaaacgacgttcagttgcgaaagaaattgcagacaagggtcgaatcatgattaatgatcgccctgcaaaatcttcaagcaatgtcatcgtgggtgataaactggagatcggatttggtaataaaacgatggtcgtacgcattacacagatcatcgaaactacgaagaaaagcgatgcagctgaaatgtatgaaattttggaaacaagacaagctgaaaactttgattaaggaaaaagcgctggccgaattaatatgggccggtgcttttttttgtgactttgttgagcatcttaataaaagtcattaagaatctgggatcttagttgacgacctttttgtgaaattgctataatgaacttaattccgagatggggggcttctaagtgagtcgaaaaattgcgaaaatcgagaatgcatttacccagcaacaagcagcccagaaaatcgtgcaagacaaggcagcccatgttaagcgtgttcataaacgccgcttatgtggcttggggattgttgcagtattagtcgtcttaatttgtggtgtgcagattttccaaacccatcattcattggccgagattagagaaacaacggcagctaaagaaaagacattaaaaaaagctaaagcaactgaatctgatttaaagattcaagtgcaacagctgcatgataatgattacttggccaaatacattcggtacaagtattactattctaaagacggtgaaaccatcttcagtttgccccaggacaaggcgcctaatttaaattagcaacaaaaataattcagaatacgaccttgtttcaagggcaaagcgtgctatacttattttattaaatatcacgcttaagtgattaaaagtttgacgagttcaaacgaccatttaggaggacgtagttttatatggcagttgaagttggttcaaaagttgctggtaaagtaacgggcattacgaattttggtgcttttgtagatttaggtgaaggcaaaaccgggttggtacatattagtgaagtgtccgatagttatatcaaagatattcatgatgttttaaccgttggtgatgaagtcacggtgaaggttatgtcagatcaaaacggtaagattggtttatcaatccgcaaagccgttgatcaacctaaagtgcaagaacatccgcgccctcaaagtcgtccaaataataatcgcggtggatatcgcaaaccagagcattcaagcgcacctaaaaaagaaggctttgatgatttattatcagggttcttaaaagatagtgaagatcgcttatcaacgattaaacggaatacagaaggtaaacgtggtggccgtggcggccgtcgcagttaatagaacaaattgataaaggttggcttgaaagtttagtgatagactttcggggcaacctttatttcatttcaagtctgtgttggagaggaatcggtatgttagaacaagcatttcaaacacatcttcaaaaagagcagttctggcaagccggcgacaaggttgtggtggcaacgtcaacgggagtcgattcaatggttttattgtggttattgactcatctgccccaaaaacaacgaccccaagtcgttgtggctcacgttaatcatgaattgcgtgcgcaaagtacggctgaagaaaaatatttaacccagttttgccgattgcatgccatcccgttacgcattcaacattggccaaaagcgagtcatcctgaaacaggggttgaagcggcggcacgtcaatttcgctatgctttttttgatcaagtcatgcgaaccgaatcggcgcattacttggtgaccgcgcatcacggcgacgatcaactagaaaccttgctcatgaaattagttcgtagcggtgaattgcatgaaatgcgggggattcggcaagtcagaccgtttaaaacggggacgttaattcgcccgctattaccttttagtaagcaacaactgcgtgattacgctgatcagattggtttgaggtattacgaagatcaaaccaatcaggaacaaactgttctccgtaatcggatgcgacatgcggtggtgccacttttaaaacgagaaaatccacacttgattcaaaatgccaatcggttcagtcaaagtctgacccaaatggtggcacaccaagatgatctaaccgcggcgttactgccattgttggcaatcaaaaaacagccgacggcaattgaagggcgtttagaccaactcgatggcttgaaccagacacaacaaagggcgctctggcaattggtgtggcaacgatatttcaagactttaccggcgttaaaggcagcccagttaatgcaagtgcaacaattgttggcgaacccgcagaaaccgcaaggccaagtggcattgaacaatggcatcatttttgaaaagcagtatcggtgttttcggattggtgtccaccaaatagtggattctttggtcaaaacacgaacattagcgattaatgaatggctgcggttaaaaaatggcgaacaagttggtgttttcgatatcgaccatctacctaatcaagttcaacggcaacaggtcgtttggttagcaccagaggaatggccactgcaactcagggcgctacaagcaacagatcgaataatgcttgataaggcacaccacaaaaccattcaacggttatggattgatactaaaaccccacaggcaaagcgccaaaatgcatgggcggtttggaccccaaatcaattgcttggccggccggatttacggatttcggcgttgtttaatcgcgaacaaactggtaaaatacggtacatactatgttatttagatgattaagcaaattacggaggctggcacaatgttagaaaaagatattgaacgcgtattatattcaagagaagacattcaaaaggttaatcagcgcttaggaaaacaaattacagcggattatcaaggtaaaaacccgttattaattggtattttaaagggtgcgatcgtcttcatgacagatttgattcgcgaaattgacctccatgttgaaatcgactttatggatgtgtcaagttatggtgctgagaccatctcgtcaggtgaagttaaaatcatcaaagatttagatacgagtgttaaaggccgcgacattatcattatcgaagatattgtagatactgggcgcacgttgaattacttaatggcaattcttaaaacacgtcaagcaaactcaattaaagtctgcacgttaatggacaaaccaagccgtcgaattgtgccagttcattcggattatgttgggatggaagtcccaaatgaattcgttgtggggtacggattggactatgccgaacgatacagaaatatgggaacaattggcgttttgaaacctgaaatttattcgggtaaataaatggtcaataaaagtcagatatgttatagtttaacagtgtcaaaaggacactgtgtcacaaatgatgagaagcttcaggaggtcacgtatgaacaacaaaaagaatggactgtttagtaatagtctgttttacattattatcttagtggctttagtcggtgtgttctcgttcttcatgaacggtaacgctggatcagagtctaaggaagttcaatcaagtacatttttaagtgaattgaagaccaataaggtcaagtcattctcaattcaaccaacgaatggtatttataaaatttctggagaatatcgtaaagcacaaaaaacagaacagcctaaaaagaatcttttaggacaaaaaacaaaagcaagatcagttaaacacttcacaacaaccttattacaaagtgattcacaagttggggcaatgaccaagttagctgacaaatcagcaaccaaggttgaaacccttcaagaaccacaatctggttggtgggtaagtattttaagtcttgtattgccattgatcatcatgtttggtttattctacatgatgatgggccaagcgggtcaaggtggcggtcaaggcggtcggatgatgaactttggtaagtccaaagctcaaaaagccgacaagaaagctaataaagtacgtttctctgatgtcgctggtgcggaagaagaaaaacaagaattagtcgaagttgttgaattcttaaaagatccacggaagtttgctgcattaggggctagaattccagcgggtgttcttttagaaggacctccaggtactggtaaaaccttattagctaaagccgttgccggagaagcaggtgtgccattcttctcaatctctggttctgacttcgttgaaatgtttgtcggtgtcggtgcaagccgtgtccgtgatttattcgaacaagccaaaaaagcagccccatcaattatctttattgatgaaattgatgctgttggtcgccaacgtggtgccggcatgggcggtgggcacgatgaacgtgaacaaacattgaaccaaatgttagttgaaatggatgggtttacggggaacgaaggcgtcatcgtcatcgctgctactaaccgttcagatgtcttagatccagcgcttttacgtccaggtcgttttgaccggaagatcctagttggtcgtccagatgttaagggccgtgaagccatcttgaaagtccatgctaagaacaaacctttagccgatgatgttgatttgaaagaaattgcgcaacaaaccccagggttcgttggtgctgatcttgaaaacttattgaacgaagctgctctagtagccgctcgtcgtagcaagaccgatatcgatgcttctgatgttgatgaagctgaagatcgtgtgattgcgggtcctgctaagcgggatcgcgtgattaatcctaaagaacgtgaaaccgtggcttaccacgaagctggtcatgcgatcattggtttagttcttagtgattctcgtgttgttcggaaggtaacaattgtccctcgtggccgtgctggcggatatgccatcatgttaccgaagaatgatcagttcttaatgagtaagaaagaattaacagaacaaattgttgggttacttggtggtcggacagctgaagaaattattttcaactctcaatcaactggtgcttctaacgatttcgaacaagcaacggatattgcccgcgggatggttactcaatatgggatgactgataagctcgggacagtggcccttgaaaaagaaggtcaaccattcgttggggcagcttacggtcaaggcccagccttctccgaaacaactgcggctgcaattgatagtgaaattcgtcggattattgacgaagcacatcaacaagcacacgaaattattgaagcgcaccgtgaacaacataagttaattgcggaaatgctcttgaagtacgaaacattaaacgaaaaagaaatcttgagcttgttcaatgatggtaagatgccagaaaagaacgctgaagaattcccaagcgaaaaagcagctacttttgaagaagctaagaaggcgcttgaagcaaaagaagccgcaaaagaagattcagaaaaagaaactgataaaaaggatgtgacaatcacacctgatgaagatgatcaatcgacaccagctgaggataatcaacatccagacgatgaagcataaattgttacaccaaaaaggtcgacacgattagtggtcgacctttttgcatcaatccataaaagaggttatttagatgacagattatttaattaaacaaatttcagaagatggccaacttcgtgcttatgcagtgaacgcaactgatgttgtaacggatgcgcaagaaaaacatgacacatggtcaacttcatcagcagcgtttgggcggacgattgtcggcacccttttattgagtgctgctggcttaaaaggtgatacgaagatgacagtcagagttgaaggtgacggcccagtcgggaagattgttgtcgatgggaatgcgcaaggcacagttaaagggtatgtgacgaatccacacgttaacctaccattgaacgacaaaaataaaattgacgttaaaggtggcgttgggacaactggtacgttgagtgtcacgaaagatcttggcttaaaagaaccgtttaccggtcaagtaccattggtatcaggagaattaggtgaagactttacttactaccttgctaaatcagaacaaacaccatctgcagttggcgtttcagtcttcgttaatgaagataactcaattggtgtcgctgggggcttcatgattcaaattctcccaggggcggatgaccggttaatcgatatcttagaagcgcggctgaaagaaatgccgctggtgtctgaattactccaacaagggatgagcccagaggaaattatcactgaaattgtgggcgaactcccaatgaagacgttagaaaaaatacctgttaaatacgaatgtgattgttcaaaggatcggtttgcaaaggcactcagttctgttgcgccagcggatttacaacaattaatcgatgaagaccacggtgctgaagcggtttgtcgtttctgtggcaagcaatatcaatttacagaagcagaactaaaggcaattttagccgcgcaatagaatagtcgcaaatttttgcctgaatactatttttttgctatgataatttggatattgtcggaagacacgaagggaatgggttggcattatgacatggcaaataggagacgtgacgattccaaatcaagtagtcgtcgcaccaatggctggtattacaaacgcagcatttcgcgtaactgcaaaggaatttggcgcaggtttagtggtctgtgaaatgatcagtgatcgcggaattatgcacaataatcaaaagacaatggggatgatgtttgttgatccgaatgaacatccagttagcatccaaatttttggtggttcaaaagacaccttagtggaagccgctaaatttgtggatcaacatacacaagctgatattattgatatcaacatgggttgtccagtgaataaagttgttaagacagatgctggcgcgcgttggttattagatccaaacaaggtttatgaaatggtctcatacgtgacagacgccgtgaagaagccagtaacggttaagatgcggacaggctgggatgaagatcatattttcgctgttgaaaatgcacttgctgccgaacgtgctggtgcttcagcacttgcaatgcacggtcggacacggaaacaaatgtacaccgggcaagcagactgggacattttaaaacaggttaaatctgaattaacgattccatttatgggtaacggtgatgtccggacaccacaagatgctaaacgtatgctagacgaagtgggtgctgatgctgtcatgattggccgggctgcgctcggtaatccatggattttaagccaagtggaaacctacttacgaacaggtgaattgattgctgaaccaaccccatgggaaaaaattgcaacggccaagttacaattacaccgtttagtcgaacttaaaggtgaaaatgtggcttgtcgtgaattcagacaacaagctgcctattacttgaaagggattcctcgtgcggctaagaccaaagcggcggttaacgaagtggaaacggaacaagccgttggcgatattttagaccactttgtagaagaaaccgaagcgagaatggcaaattaggttccttatgttggtgttttcgtgttaaaatcaacattagtagataattgaatgtatggaggaattgtcagttgggacaaaaagataatcaaagagaaatgaacgaccaactaaaggtccggcgtgaaaagttacaattgttaaaagacgaaggaattgatccttttggtagtcgttttgatagaacacatatggctgcggaattacacagtgaattcgaagcaattgaaaaagacgatttagatgctaagaatctagaagtcacaattgcaggacggatgatgtctaaacgggggaaagggaaagttggctttgctgacatccgtgaccgttcaggtaaaatccaaatttacgtgcgtaaagatgaagttggcgaagaaaactatttaattttcaaaaaggctgacttaggtgatcatttagggattactgggcaaattatgaagactgacatgggtgagttaactgttaaagcaacgcacctgactttcctatcaaaagcattacgaccattgccagataagttccatggtttaaccaacgtggaacaaatctatcgtcaacgttacttagatttaatcgcaaatccagagagcttggatcggttcacgaaacgcagcaagattatttctgctgtccgtgaatatttagataacaatggctttactgaagttgaaacacctgtcttgcatggtcaagctggtggtgcatcagcacgaccatttattacccatcacaatgcgctagacatcaacttgtacttgcggattgcgcttgaacttcatttgaaacgattaatcgttggtgggatggaacgtgtctatgaaattggccgcgtattccggaatgaagggattgatacgaaacacaatcctgaatttacaatgctagaaacatatgctgcatactttgattataaagacgttatggatgaaacagaaggtatcatccgatttgcagcgcacaaggttttaggaactggtcagatttcatatcaaggacaagcgattgatcttgatggtgattttggacgggttcacatggtcgatgcaattaaggaaaagacgggtgtcgatttctggcaaccaatgacggttgaagcagcgcgtgaattagctgatcaacaccacgtgaagtatgaatcatactggcaagtggggcacatcattaatgcgttctttgaagaattcgtggaagatacattggtacaaccaaccttcatctatggtcatccagttgaaatctcaccattggctaagaagaatgctgaagatgatcgttttacagaccgttgggaattatttatgtacggtaacgaatatgcaaatgcctttactgaattaaacgaccctatcgatcaacgtgaacgttttgaagcacaagctaaagaacgtgaaaatgggaacgatgaagccgaaggaatcgatgaagattacatcgaagcattggaatacggaatgccaccgactggcggacttggaattgggattgatcgactagtcatgttactgacagatgctgcatcaattcgggatgtcttattattcccaacaatgcgtccagacaacaataataacgattaagattaaactaaagcccgcaagcagacgatttgcttgcgggctttttttattgaaaaaaattgggattataaaaagtttttttagtgtattttgtgggtgaataagcatcaactttcggtatattatgttgtttgcgcgagttgttcgtttaatagttcatttatttgcataaattgcggatactatcgactgtttagattatgaaagttcataaataacagttgagattaatagttgacgaaaggctgtagagctgatatagtagtctatgttgtcagcgagataaaacattgttgctaacgagtcaggtaattaaatcagtttgaatatttattcaaaaaacatttaaactataaaaatcctgagaataacagtatgttgttctcaggatttttttggggagaagattcgggatttattttcagaatgaacgccggtgacgcttgacctttggcgttcactcagctaaactattaacaacgcgttgaacaagagcgattaagattgggctagtttagagagaagatgcatggctgagacgtcttccaatgaccaattaatcggtagcttgtgagctgttaacctgaaattaagtagggctaaccggacaatttcgttcgttaacaaatcatgagttggggactagtctagtcctaatttaggtggtaccgcgaaaaagcattcgtcctattgtgaggaatgcttttttgtttgccattaaacgcaatattttaaaggagtgaacaagatgactgatcacaaagaaatgtcaaccaaatatgatccaaatcaagttgaagccggtcgttatcaagattggttagacgctgatttattcaagccaaatgccaatccagatgccaaaccttattcaatcgttattccaccgccaaatgttacgggtaaactccatttaggccatgcctgggatacgaccttacaagatatgttaatccggcaaaaacggatgcaagggtatgatgtactctggttgccagggatggatcatgccgggattgcaactcaagctaaagtggaagcaaaattagctgaacaagggatttcacgttatgacttaggtcgtgaaaaattcatcgaacaagtctgggactggaaagatgaatatgccgcaaccatccacgcacaatgggctaagatgggcttatcacttgattattcacgtgaacggttcacattagacgatggcttatcagacgctgttcgtaaagtctttgttaccttatacaacaagggcttaatctatcgtggcgaatacatcatcaattgggatccaaaagcacggacggctttatcagatatcgaagtgttgcatcaagatgatgaaggggccttctatcatgttaactatccattgaccgatggttctgggagcatcgaaattgccacaacacgtcctgaaacattacctggtgatactgctatcgctgtacatccagatgatgaacggtatgcggaccttgttggcaagacggtcacattaccattaatgaatcgtgaaattccgattatcgctgatcactatgtcgataaggatttcggtactggtgctttgaagattacaccagcacacgaccctaacgattttgaagtcggtaatcggcatgacttaccacggatcaatgtcatgaacgaagatgccagcatgaatgaaagtgccggcaagtataacggcatggatcgttttgaagcacgtaaagcgattgttgctgacttgaaggaacaaggttatttgattaaagtcgacccaatgacacatagtgttggtcattctgaacggaccggtgtacaagttgaagcccggctttcaacgcaatggtttgttaagatgaagccacttgctgaaatggctttgaagaaccaagcaaccgatcaaaaggtgaactttgtgccagaacgattcgaaaataccttcacacaatggatggaaaacgttcatgattgggttatttcgcgtcaattatggtgggggcaccaaatcccagcttggtaccataaacaaactggtgaaatgtatgtcggcgaagaagcaccaaaagatatcgaaaactggactcaagattctgatgtcctagacacatggttcagtagtgccttatggccattttcaacaatgggttggccaaacactgaagcgcctgacttcaaacgctacttcccaaccaatacgttggtaactggctacgatatcatcttcttctgggtctcacggatgattttccaaagtctcgaatttacagaacaacgcccattcgaacacgtcctcattcacggtttaatccgcgatgaacaaggccgtaagatgagtaaatcacttggtaatgggattgacccaatggaagtcattgaaaaatacggtgccgatgcattgcgttggttcttaacgagtggctcaacaccaggccaagatgttcgtttcagttacacgaagatggatgctgcctggaacttcatcaataagatttggaacgcaagtcgtttcgtcatcatgaaccttgaagacacaccagcgccaacgaagatgccagatgccgctaaccttgatttaacggacaaatggatcttaagccaattgaaccaaacggtggcagatgttacacggctttatgaaagcttcgaatttggtgaagcaggccggacattgtataactttatctggaacgatttctgtgactggtatattgaaatggcgaaggaagtcctttacggagacgaccaagcagccattgccaataaacgttataacttggcttatgttttagaccaaacattgcgtctattacacccagtgatgccatttgtcacggaagaaatctggcaaagtatgccacatactggcgattcaatcgtcaatgcggcttatccagaagtgcacgctgaattagacgatccagaagcaacaacgcaaatgaatgcgttaatcgatctaattagaagtgtccggaatatccgttccgaagccaatgcaccactaagcaagccaattgatgtcttggtcaacattcaagatgcgccattaatgacgatcttcaaacaaaaccaagacttcatcgaacgcttcgtacatcctaagtcacttgaaattgctgaaggtttaacagcaccagcattggcgaagacagccattatcagtggtgcagaagtttatgtgccattggctgaattgctcgacttagacgaagaaatcgcccgtttagaaggcgaattgaaacgtttagacggtgaaatcaaacgtgctaaaggcaagttgtcaaacaagggcttcacagaccgcgcaccagaaaaagtggtccaagaagaacgcgacaaacaagcagactacgaacaacaataccaatcagtcgaaaaacgagtagcagaattaaaaaatgcataagtgcatcatcaacggttagcttctgagcatttgcctaacttagcgaattggcgctgtaagcgccgatttgataagtgtagcaaagcacaagaagctgttgatgaaaacacgttaaaaaagaagtgcgactcgagctggttaggctttgaggattaacagtaaaatgggcattgtggcgttttttgccatgatgcccattttgcagttaaccggaaaaggctgctcgaggagcacgttagtgaaagaagtgtgattggttgcgggtagcaactgagcatcaatacaaaaattccgttaattcaggttttaggattaacggaatttttagattaagcggaagttgttgcaaccaaaagcacgttaaggccaccttaaaaactgaggtggtctttttgtgtgcgccagtttttaagcatcgattcgcgtgcaatctatgctaaaatagagacagtttgttaaaggagattggcgatgttagtgacagattacgaaacagctttggcgtatattcattcgcgccccagattacataaagaagcgaacctgaaccgaatgacgcaattgttggcaggtctcggtaatccgcaagaaaaccaacaattcattcatgtgactggcactaatggcaagggatccgttgtcaaaatggtcagttgtttgattgaagagttaggtttaaaagtcggtcgttacacatcgccgtttattatgcggttcaacgagcgaattgttatcaatcaggaaccaatcagtgatgccgatttagtaactgttacgcaacaaattcagacaacggttgcccagattcaaacaactgaccccgaatttgaagtgaccgagtttgaatggatcacagcaatgatgtttctatatttcaaacaacagcaggttgatgtcgccgttgtggaagtcggaattggcggtttgtatgactcgactaatgtgttgacgccgctgatatcagttattacgtcgattggtcttgatcatcaggctctattaggcaagacatttgcagaaattgcgactcaaaaagccgggatcattaaggctggtcatccagtcgtgattggtcaattaccaaaagaagcactgacggtggttgaggaaacggcaactcgtttgaatagttcgttagccattagtggctgtgatttttcgagtgctgcggtcaaaacgttacctacttgggggcaacagttaactttccaaaatgacgcggtaacgtatcgacaattacagattccgctgatgggggattatcaaattgaaaacgccgcggttgcattacaagtattttggtgttacttacagttgacgcaacaaaaactagaggttcgagacatcaagcgtgctttaaaacgggttaactggcctgggcgcttcgaaaaaatcaacgatgagccgttaattatcttggatggtgcacataatccggaaggggtggcgcaattggttcagacaacgcggcatcaatttaaaaatcgtgacatttacctgttattcggagcgcttggtgataaaaatctggatgagatgttaccacagctcaaaaaaatagcgacgcggatggtgctgactacggttcctgataatccacgcgcggcaacagcggcccaatatgcagcagttgatgagacgattacatttgaaccggactggccggttgcattaaccgaattattagcggatgtgtcggctgatgatgtattactcgtaacgggttcgctatatttaattagtacgattcgccaatattttaaaggagaatagtcaatgacaactagaggaattatttttgatatggacggtctattggttgattcggagaagatttattaccaagccaatattcgggccgctaaagaaatgggctttgattttacacctgaagatcaccatgccatcttagggaccactgatacgtatttacgcaattattttaaagcaaagcttggttcggcaacggccgcaacagaatttattgatcgttcataccataacgtagcaacggttgttgaagcagatggtgttgcaattaagccagggttagtcgatttactagattactgtgataatcaggggattagtcgggtgattgcatcgagcaatttccgcagcatggtcgatgactttatgcaaagtactggcctacaatcacggtttagtcaaattgttgcgggagacgaagtgactcacggcaaaccgaaccccgaaatctttttaaaagcgttggatagattagccttaccagcgcctagtgccctagtattagaagactcacctaatggtgtgatggccgctagtaaagctgccattccggtgattatggtccctgatttaattgcaccaactgcgataaccaatcagcaaacacttgcgaccgttggggatttggctcaagtgattccgtatttagaaaaataagcccgttaattaacgtattgttagttaaaccaagaagacgcgtcatgcgtctttttttgtgggaggcaaacaatggcggggaatacaggacaattacaaccaagagaacaattaatgcagtacggcgcagcaagtttatcgaacgagcaattggcaatcgtcattttgcgttctggtaatagtcacctatctgttggtgaggtggcgcgcaaattgctagcgcattatcctgactttcgggatttagaacaagcaagtttaacgcagttggaaacactggcaggaattggaccagtcaaagcgattgaaatccaagccatctgtgaattgagtcaccgattgcaaacgcaacgaactctccggtttggtgtggtcgcatcgagccaaatggttggccgtcgcatgattgaaacactagcgggcgaaacgcaagaacaactgctagctgtttttttagacgttaaaaatcaaattattcagatgaaacagatttatattggcacactcgatagttcagttgcgcatccgcgggaagtctttaaattagcggtccgttattctgcagcaaaatttattttggtgcataatcatccaagcggccagttgacgccgtcaacgcaagatattgccttcactaaacgaattgtcgcctgtggtgaactgatgggcattgtatgcctagaccacttgattattggaagccagcagtatctcagtttgcgagaagagggttacttagtggagtaaaagagaacgcttttttctttaagaatctgttaattttaggcgagacctgtcaaattttctgaaaatccgttaacatagtagttacattgcgttttttattacgtaaaattatgatataatgccaatgactataaaaacgtttggtaactgaaggagagaaaaatagtgttcggattagggactagaaatatcggtattgacttaggtaccgcaaacacactcgtatacatggacggtaaagacattgtcttgagagaaccctctgttgtcgctaaaaatacacaaactggtgacgtgattgctgttggctcagaagcccgcgacatgatcggccggacacctggtagtattgtggcaattcgcccaatgaaagatggcgtgatcgcagattacgatacaactgctgccatgcttaaatattttatcgaaaaatcattaggtcgctcatctagcaagccatttgtaatggtctgcgtaccaagtggtgtgactgaagttgaaaaacgtgctgtaatcgatgcaactaaggtggcaggcgctcgtgatgcatacgtcattgaagaaccatttgcagctgcaattggtgccggtcttcctgtgatggatccaactggtagcatggtcgttgatatcggtggcgggacaacagacgttgccacaatctcattaggtgggattgtttcaagccgttcaattcgaatggctggcgacaagttagatgacgcgatcatttcttacatccgtcaaaacaataacttgttgattggtgaaagaacagccgaacaaatcaaattccaaatcgcttcagcatcaccagaacgcgctaaggaaattgaagcgatgagcattcgtggtcgcgatttagtaactgggctacctaagacagtggacattcaagctgttgatattgctgaagccatcaaagaagttgtcacagccattatcgaagccatcaaagaaacacttgaagaaacatcaccagaaattgcagccgacgtgattgatcacgggattgtcttaactggtggcggcgcattgttgaaacacttaccagaagtgatttcagatgctactaaagtgccagtctttatcgctcaagatcctttagactgtgttgcagtcggaactggcgaatcattaaagaatatcgatgttatgaagaaaaattaatcgttcagtagaagtgggacaagaagcggtcagcgttgacgtagcgcctaaattagtgacagattcgggttgtgaatcgattgctataggaaggactactgatcaccggtttttgtcccacctttacgatattaaggatggatggtggcgaagaaaccatgcaaaagtttttttcaaataagaagttaattgtgttattaatcatgctaatcgtctgcatgggcttcatcgcaatgtcagttggtttacgcaataacaaaaagagtccgagtttcgtacgccaatttggcaacgacgtaacgggcatcactaaccaagtcattagcgtgccggccaatgggattggtcgaggggtagatgccttaacagacttgattaatacgtaccaggaaaacaaagaacttaaagcacaacttgatgatttagctcaaaccaaggttcaaacccaaaccctcaaagaagaaaatgcaagtttgaaaaaggaactcggcttaaaaggcaccttgacggattatacaaccgttaatgcgtctgttttatcccggaatcctgataattggcaaaatgcattggttatcaataaaggggccttagctggacttaaaaaagatatgcccgtcatgtctgagtctgggattattggacggattgttgaagtcaacaagactaattcgaaggttgaactcgtttcaagtacggatcaaagtagtaacggatttgctgctgtggtgaataccaaagatggtaagcaagttaatgggatcatgtccggttacaatgctgaccggaaacaattgaagctcgggcagattaagaccgatgcggcaatcgaaaaaggtgacaaagtgatcacgtctggtttaggtggattaacccctaaaggcttgtaccttggtaaggtagcagcagttaagaaagacgattttgggttagcattaactgtttatgtgaccccagctgctgatttaaacaatttaaccgttgtgactgtcatcaaacgaacgattgaaggtgagtagcatgggtgtgacgcgattacaacggcgctatttattaccaatctacttactcgttgcgttttatttggatggcgccatcagtcatttatgtgaacaatggttatatacaccagatcatacgttgattagccggctatttatgctcgtgttagtggtaacggcctttgttttaccagaggaacgccaacttacgtggtatgcagcagggattggtcttttatacgatttgtattatacggggatgatcgggatgtacacttttgcagtgccgctcattatctatacagtgcgttatttaaaacaatatttacctgactcagcctttttcattgggctaatcgatgtcttgtgtttaacattactcgagagtacgatttacatcatgaatcgcttgattggttatgcaacagtaacaccagtcgaatttattagtaatgttttagcaccgacaattgcattaaatttggtttattttgtctttttgtatttgcctttaaaatatttattgctaaaattaaaatcagaacggtaaggggtttgatttttctatggatgcagtcacgttgcgaggacgcaaagaaggttttgaattaaacattgatgcgggtgcggatttcgatcaagcattagttgcactagcggaattattgaataagattcgcttagagcaaccgcagttggggagcgatcagattgaactggagctgaccactggtagacgcttgttgaatgatgcgcaaaagcaagcactggcgaccgtctttgagcagtttccagaatttaatgggacaagcattcaatcggaagtcatgacgattgaacaggctgagattgatcggcgggaaaatagtattcacgttgaacccaatgttttacgaagcggccaagaggtcaattatgttggcgatgtcttattcgtcggtaatttacaccaaggcgcaatgttaaaagcaacgggcagtatcttcgtacttggtgaagttgccgggattgtgcacgctgggtttccagataatgcagaagcagttgttgcaggtgatttatcacacgcgttacaattgcggatagcagacgcagttgagattctcgatcaccagaagacgccatttacggcacagagtgtaagtttcatcaatgatttacatgttatcgactacggtgagttaacggatttgaaacagattaatccaaaattatatcgtaaaatgaaggagcaataaaaatgggaacagctttggttattacatccggtaaaggcggcgttggtaaaacaacatcaagcgccaatattgggacggcgcttgcgcttttagataagaaggtttgcttgttagatttagacattggtctgcgtaatttagatgttgtcttaggattgagcaaccgcattatttatgatatcgtggatgtcgcccaaggccgtgctaagttgcaccaagcactgattaaagataaacgttttgatgaaaaaatttacttattgccagccgctcaaaatgcggataaagaagcgttaacgcctgatgaagtcaccgccatcgtgaatgaattaaaagaagaattcgattttgtgattcttgattgtcctgctgggattgaatctggctttaaaaatgcgattgccggtgcagacggtgcaattgtggttgcaactcccgaaatttcttctgttagtgatgctgaccgcgttgtcggcttgctagaagaagaagaaatgcggattgcgccacgcttagtaattaaccggattcggcgtcatatgatgaatgaaggcgaaacgatggatgttgatgaaattaccaaacatctttcaatttcattgttaggcattatttttgatgatgatgcggttatcaagacgtccaatgccggcgaaccaattgtgatggatccgaaaaacccagcaagccaaggctatcggaatattgcccgtcgtttactaggcgaaacagttccattgatgactttgaaacaacacaaggttggtttctgggcccgtcttttcggtaagcaataaacattaaccattgacttttgatgcgatattgaatagaatgaataacaatacattaaacgttgaacggtccaaattaattcttgaggttcagagagctgatgcgtggtggaagtcggcccttgagattaatggcacaaccgtgagtttgatcatcgaataaagatgatccgttagcccgttatcgctgtagttttagaaactacataagtttaagctgcgtgagcagtttattaaactgaggtggcaccgcgataaattcgtcctcttggagaaatccaggggactttttttattggtctaaaactaactgagttgtttgttgtgaggcaaacaaaaatttgaggtggcaccgcgaaatttagccctctttgtgttttaaacgcaaagagggctttttattttggacaaatgagaggagtctgtcatgattgactatagtttatcgattttaccagcattattaagtggggcgcagatgacgttggctgtttttggcctaacgattattggcgcgattccacttggtttattattaagtttagggttattagctaagtttaaaccactgcattatcttttagatttatatgtgtggctgatgcgtgggacaccgttattattacaactaatttttgtattttatggtttacccgtggtcggaattgtttttaaccggttcgatgctgctttaatcgcttttattttgaattatgctgcgtattttgccgaaattttccggggcggctttcaagccgttgataatggtcagatcgaagcagctgaggtcttaggcttaacttacccacaaacaatcgctaaaattatcgtgccccaaacggttaaaattgtcttaccgtctgtcggtaacgaagtgatcaacttgattaaagattcatcgttagtgtatgttatcggcattggggatttactgcgggctggcaatgtcgcaagtgcgcgtgatgtcaatctcttaccacttttgctagtcgggattatttatttattgttaacagccatttgtacatgggcattacggcgtttggaacgctattatcgttattatcgctaaggaggcggcaacatgtttcaattagaaaatatcaatcaatccttcaaaggtcggcaaattttgaacgacttaaatttatcagttgaatcagggagtattttagcgattgtcggtccaagtggtgctggcaaatcaactttattacggttaatgagtgggcttgatcaacccgatagcggacggtttattattgatggtaaaccttacgaacctagtaatcgggaacaaggggcgcgcattggcgttgtcttccaagattttcggttattcccacatctttctgtccttgagaatgtgacgctggcacccatcatggtcaaaaaacaacccgctaaaaaggctaaagcagatggcgcaaaattattacagcaactagggttaagtgctcaggcgacggcttatccgttccaactatcaggcggtcaacgtcaacgagtcgcaattgcccgcgcattggcgatgcaaccggagattctctgttatgacgaaccaaccagcgcacttgatccatcgttagtggcaagtgtcgcacaactcattttagatttgaaacagcagggaatgacacaaattgttgtcacccatgatattcaatttgccaaccagattgctgatcaaatctttgaattacaaccaaacggggttcaacaaaatgatgaagcttaaaaaaacagcattaatagcggctttattgatgagcatgattggtttagcagggtgcgcacaacgcaatcagcaggctgatcaatgggcaacgattcaaaaacgccaaaaaatagtcgtcgggattgatgatagttttgtgccaatgacttaccgtgagaagaatggtcaattaaccggttttgatgttgatttggcacgggcgatttttaaggggagtggcattcgggttgactttcagtcgattgattgggatatgaaagaaacggaattgaataatcaaacgattgatttaatttggagtggttattctaaaacggcgcaacgggcaaaacgggttgcgtttagtgacccgtatctgactaatcggcaaatgattgtgtcgctcaagaaacaccctgttaatcaaatggctgatttaaccaaccaaccattaggcgttcaaacgggctcatctgggatggaacaactagagcgttatcctaaacgattacagcaaagaattgccaaccatgcaccaatcctatatgatacttataacaatgcgtttatcgacttacaggccgatcggattaaggggctcttaattgatgaagtctacgcgcaatttgaaattaagtcacgccacaacggcagcgattttcaagccatcgacagtccttttgcagcagaacagtttgctgttgggatgcgtccgcaagatcaacaattacgtcaatttatcaaccgacgttatcgggtcttacaagcaaatggtacgctagccaaattaaaagcaaagtggtttaaagaataggatgaatgaagaatgacagcaatcattatctgggggatagcactgatttggattgcaaatacaatcggggctgttatcaccgtatttcgccaacaacgtgatattgcagcaacctgggcctggctcttggtattgattttcttaccaattatcggctttgttttgtatctatttttcggaaaaaaattaccggaagatcatatggtcgatttgaaaacacaagaacggctcggcattgatgccttggtgacctcccaaaaagcagcgttacgccaagcgcagaagcaacacacgttaccgccagaaacgcagagcttaatcaacctcttcttagtatcaaataccgcggttgtgacccaggaaaacaatgtaacaattttaacggatttgaaggcggcgtatcaacagttgttaacggatgtcaatcgggcgcaagatcatatccatcttgaatactatgctttttatgacaacgaacacgggcgtcaactggtcaatctattggcttacaaggcactgcggggggtaaaagtgcgtgtgatgtatgatgcatttgggtcgcaacatttatcccggcagttctttaagccattggaagcagccggcggccaagttgtcccgttttttagttctcggttccggttcgttaatctacgctttaactttcgtaaccaccggcaattggcagtaattgatggcaataccgcctaccttggcgattttaaccagaataatcatcacgttaatattcctgcacgagatacgcggattcggattaccggcgatggtgtgttatcgtttcaagctcgctttttcatggactggaatgcggctacgcgtcaggaaaaggtgtattacagtccgcaatattttcctaactcagatgaacacgggcagactagcatgcaactggtatcaagtggacctgatcgagaactcgatgagattaagttaggctttttgaagatgattgctgccgctaaaaaacggctgtggattcagaccccatattttattccggatgattctgtattggcggcgttagtgttagccattaattctggggtgactgtgaagatcatgatggccaaacgtgcaaaacataaaatgattcatcatgcgagtttgtattacgctagacaaatcgtgaaggcgggcggtcagatttacttctctgaatcaaccggatttaaatcacgcgtaatgttagttgatgggcaactagcagcggttgggacggctaatttagatattcgcagttttagattgaattttgaaacgaccgcttttttatatgatgcacaactcgcaactgaacttgaacaatcttttacggctgatttaaaagaatgcttaccatttacgaaacaacggatacaagagcaaagcaatcaagaacgttggtcacaggacttggcgcgtttgtttgccccaattatgtaaaaaagaaccgtcagatttaatctgacggttcttttttagttatttgaaatagtcggttaagccggtataaacggcatcagcgactttagcttggtaattagcactgctaatataactaaagtctttatcagaattgatgtagccgagttctaagagaacagcaggccgttgattatcgcgaaggacttgataattgccgtattcaatgccgcgattgttaagcggtaatgtcttagtctgattgttgatggccttcgcgaggctcatatccttactgcttgaatagtagtaggttgttgtcccggatgcttcattggcttcattgcttgaatcaaaatgaacgctgataaaggcatcagcctttaatttattggcaagagcaggtcgcggttcgagatcgacaaaactatcatttgaacgcgttagcacgacgttagcaccagccgcttttaattttttagcaatcgcatcgacggtcgctaatgtgtagtctttttcatacttagacttagttgaaagtgcaccgacgtcggtgccaccatgaccagcatctaaaacaatggtggcttcagaaagggaagtagcgctagtcttaacaacttcattcttctcagaaggagtgacaacccaacttgcgacgtaaccggtattaccatcggcatctttaacttgataccaagtaccactcttattgatataagttagcttggtattggctgggtagctttgggtatattgatacgaaacatcaggaccagtgcgtagcttggtattatccagttgggtggtcactgatttaatcgcggagctacttgtatcagtatccgtagactcagattcagcggttgtcgttttttgaacagtcgccggagcttggtcggaaacttcgattaaatcactttgtacccaaccaactgctgagttgtatttaatctggctccaaccgttttgttggtataagactgtaatttcgtcaccttgatttaacttaccgagtagttgactatcggcactactgctttggcggacattggcaaaactgttggtgaccttagcgactcggtttgaagtggcactgacttcggtgttatcgactaaccagctagcaacccagccaatcttatcaccacttaagcgcacttggtaccaattattcttttgtgagataacattcattgtttcgcctttattggcttgactcatgacatcataagataatccagggccttggcgaacgtttacgacgttcgctttaatcgtaatttgttggtaagcagccagcgcgtgggtcacaaagagaccgacaaaaacgagtaatgctaatataataacggccggatagtgtttaaaccagctcaaaggtttctgcatttttttcaacacctttgttatgttttattaatttataaggttaattatagcaaaaaactcaactttctaaagagtttcagcgaaaaagttacaaaaaattcaagattgattgacttttttttgaaataacgttaatcttataacaataagaataagtgatgaccagtgataaagtaaaggctaagccccctacgacagagatgatttcacagctgcaagaaatcaatggcacgccgagactgcttttgaggtctgtgtggtcgcacaccgttggcaacaacgttatataattaagctaaaattaaggtggtaccgtgcatttaagcacccttgttcaacgacaggggtgtttttttatttggtatccatttggaggaatgatcatgggctatcaaaagccaaaaggaactgcggatattttacctggagattcaaaccagtggcaattagtggagaaaacggcacgcgacgtttttgcccgctatcaattcaacgaaattagaacaccattatttgaaagctatgatgtcttttcacggagttcaggcgatacatctgatattgtcagcaaagaaatgtatgatttcatggataaaggggatcggcatatcgcgctgcgtccagagggcacagctggagttgtacgggcgttcgtagaaaataaactttatgggccagaacatcaaaaaccttataaggtgtattacatgggaccaatgttccgttatgaacggccacaatcaggccggcaacgccagttccatcaaattggggtcgaagcatttggttctgagaatccagcggtcgatattgaagtcattagcatggcgatgcgtttattacgtgaatgccatattacggatttaaaactggccatcaataccttaggggatgcggaaagtcgcgcggcttatcatgaagcccttgtcagctatcttgaaccacattttgatgaattaagtgacgattctaaagttcgtctacacaagaacccattgcgcgtcttagatagtaaagatgctaaggaccaagaaattgtgaaggatgcacctgttattttggattacttaacaccagaagcaacggcgcactttgaaacggttaagcacttacttgaaacattgcacattccatatgaagtggatactgaaatggtgcgcggactcgattattacaatcacacaatttttgaaattatgacaaataataaggtgcttggtcgcggctacacaaccgtcttagccggtggccgttataatgggttagttgaacaacttggtggcccggacatgccaggggttggttttggcttaggcgttgaacgattattattattgatgaatgcgcaaaacgaagcgttggttccagaatctaaactcgatgtgtatgtcgttggaattggcgctgaaacaagtgcgacaactctccaaatcgttgaaaagattcgtgatacaggtttaaccgctgatcgagactatcttgatcgtaaaccaaaagcgcaatttaaaacagctaataagttaaacgcccaaatggtgattacaatcggtgaatcagaattagctgatcaaacagcacatgttaaagacatgattagtggtgttgaaattacggtaccacttgctgaagtctatgctgactttaaagcagtgcaacaacagttaaatcaaaattaacgcatataagatgcctcaaaagtaaatttgaggcatcttttttatttgatggcagtcaattcactttaatcctcaggaaatcccagactgtcagaacactctgagcatatttgtcgctatctgtttgtatctgcttataataataaacacgaaggagtgatggatatgacagatgatttagaacaacggttaacgacggaacaatatgcggtaacccaacaaaatgcgacggaggccccatttaccggcgagtatgatgattttgatgaacaaggcatctacgtggatgttgtcagtcatgaaccattatttagttcgttagataaatatgatgcaggctgtggttggccctcatttacaaagccaattgcgcctttgacggaacgccgggaccaatcttatgggatggaacgcgttgaagtccgtagtgaagaagctaattcgcatttagggcacgtttttaatgatggaccgcaagaagctggtggattacgctattgcatcaactcagcagctttaaaatttattccagtcgagcaactcgaaaatgaaggttacggtcaatatctaagcttatttgaagagggggcacaataatggcaactgatacagcaatttttgccggtgggtgtttttggtgcatggttcatccgtttgatcagcaaccggggattatcaaggttgtttctggttataccggtgggcatgttcctaatccaacttatgaggaagtttgctcgcatacgacggggcacactgaagcagttgaaattacatttgatcccgcgattatttcttatgcggaattagttgaaatttattggcgccaaacagatccaaccgatgccatggggcagttccaagatcgtggcgatagttaccggccggtgattttcgttaactcgcctgagcaacgtgcaatcgcggaagcttccaaacaagcattaatcgatagtggtcgcttcaacgaaccgattgtcacgcaaattgaggctgccaaaccgttctatccagccgaagaatatcaccaagatttctataaaaaagaaccatttagagcagaattggtcgaggggacacgccgtgctttcattcgtgaaaattgggtgcattaattccaagaaatcctttagtattcacaaatggtatgctagaatgaaagacatcaaaagtgaataggtgtgatattcaagtggacgatttagctcggaaacatcaaaatatggcgaagatttcggcagccattttatacggaatttgtgtgtcgattgcattgaactttttctgggaagaaggtggcatttacgcctctggggttaccgggttcgcgcaattcattcatacagtgacgtcgaaatttatgccgtttctaccatttccattatcaacgtcattgatgttattcgtgttaaatgtgccattatttattcttgcgtggttcaaaattggccaccatttcaccatttatacgtttattgcagttgttttttcaagtgttatggtacagattatgccctttacacagctaacggctaatccgattatctgtgcgatttttggggcggtaattaacggttttgggaccgggatggccttgaaaaacgatatttccactggtggcttagatatcattgggattgtactgcgcaaaaaaaccggccgttcagtcggttcaatcaatatcatgtttaatgtggcgctcgtttttgccgctgggtttctctttggttgggaacatgcgctctatagtatcttgagtatttttgtcaacggcaaagtcatcgatatggtttatacgcgccaacaaaaactgcaagtgatgattattaccgataagccccaagttgtgattcaaatgattcaagacgaaatgcggcgtgggattacgattgtccacgacgtagaaggggcatataaccgtgaagaaaagacgatgttatttaccgttatttctcgctttgaaatgcatgatttagaaatggtcatgaaacaagcggatgaccacgcattcgtcagcatgacggaagctgtcaaaattctcgggcatttctatgaacctaagattaaataagataacccgccattcaattgaatggcgggctttttttatgggttaggtttcgtcttgctttttgttgcgctttctgtgacaatctaggtaatcaaaatgcatggaggtagtggaatgttattagggagtcacgttagtatgaagggcaagcagatgttactagggtcagcggagagtgcagttgattttggtgcaaatgccttcatgatatataccggcgcgccacaaaatacgcgccgcaaaccaatcgaagaattaaatattgaagcagcaaaaccctatattgaagctcacaacttaggtccaattgttgttcatgcaccatacatcgttaatttagggaatacagtgaagcctgagaacttcaagtttgcggtctcttttttacaagaagaagtgttacgcgctgaagcattaggggccactcaaatcgtcttgcatccaggtgcacacgttggggcgggtgcagatgctggtattcaacaaattatcaaaggattaaacgaaattttacgacctgatcaaaccgcccaaattgccttagaaaccatggcaggtaaaggaaccgaagtcgggcggtcatttgaagaacttgcacagatgatcgatggcgtgacttacaatgaaaagttatcagtgacgtttgatacttgtcatacaaatgatgccggatataatgtgcgtgaagattttgatggcgttttgaatgaattcgatcacattatcggtttggaccgcttaaaagttgttcatttaaacgattctaagaacccacaaggcgcacacaaagatcgtcatgccaatattggttttggtgaaatcggatttgatgcgctaaaccatgtcttacagcatgaacaactcgttaatgtgcctaaaattctagaaaccccatatgttggcgaagataagaagcataactttgcaccatatgcgtatgaaattgcgatgctcaaagcggggcaattcgaccctgatttattaacgaaggttgagcagaacgaaggcaaactatgaatttaaaacgaactaagtttggtatttttatcttaatagcggcgttttggacctttatttttagccagccagtccaggctgccgatacctatgacatcagtcgttatcaggtaaacgttgatgtacaacctgatgggagtgctcaggtcgaacaaaaaacggtgtttgatatccaagatgatatccatggggtctatatcaaccagaatctccaaacaaacgttggtcaaccaaagaagttggttaacccgcaagtcgcagttaatggtcatccgtttagtcaaagtgaatcaggtactgaaggcacctatagcttaactgatacacaacaaaattatcggttcaaactataccaaactgcacaagatggcaatcaattagcggttactttgaaatatcagttacaaaatctgattattaattatcgtgatacggcggaattgaattggaaagtgattggcgatgcgtgggatagtgacttacaaaacgttcaagtggtaatacaattacctaccacattcaaaaaagcagacctcaaatcatggacgcacggcaatttagatgggcaacaagtcgttgaacccgataaaggccgggtaacaattaaactcgctaataatccagcaaaccaatttgtcgaaagccatattatttttccaacggcggtgactgcggcgaatccgaatcagattgatcaatcacgtcgggcagccattatcaaacaagaagcacgtttggcgcaacaagctaatcaagaacgcaaagcacaaaaacgccgttattggcttttatctataggagcagtggtcttagcgcccggcatgttcttgttaattttacgtaaaattcgaaaaacgcttcctgtgatgacttatactggacaggcaccagaacacgtctatgatttgccagatgaaaatgggcctgcggttgtgcgtcagttgttggcattaccaattacggagacagcaggggcggagagcttatccgcaacgattctagacttagttgctcgaaagaatctaacaattgatgttcaggaaccaaagaaggaactattccataaaaaaatgccgcaattttcattaacgctcgtcaatcgcaatcagttatcacattcagaaaagaagttagttagctggctatttgatgtggttggtgatgggcagcatgtcagtctatttgagattgagaaatatccaaaacggcatagtgcaaaactgttcaatcaacattaccatgggtggcaaacagcagtggcgactgaagcaagtcgtagcgggtggttacgagaacacatcgctgagttaatgaccagtttgaattattggttaatcggccttggcgccctatttttaattttgatttttggtgctttgattggcttagttgcttggtggacgctcattccgatggggcttgtcttcattttaaccgtctggcgtagatttaatttgcaactatggacgcaattgggttacgaaaaacggggcgaatggcaaggctttaaacaaatgctaaaggatatttcgacactcgatatggcgaatgtcccagatgtactattgtgggatcgatatttgagttatgcaacggccttcgggattgctgataaggtcgttaaagctttgaagattcgattgacgccggaacaacttcaaacaatgcctctgggttattattattactacgggtatactggggggttgaacatcggtcaatcctttacaacagctctcaatagtagtgttggcagtgcggtcagtgctgctaatccaacaagtgttagtggtggttctggcggcttttcaggcggctcatcaggcggtttcggtggcggttccggtggtgggactttctagtccaatcaaatgattaggtgaaacgccaacacactggtattatgagcgttattaaaatgtaattaacgcgctaaataagtgttagttggaggaggaaagcacatggagtttaacgatgtggttaatcaccgcaaggcaattcgggcatttgacccaaacaaaccgatctcggatgaattaatcgaaaaaataatggtgtccgcccaacgaacaccgtcgtggacgaattcacaaccttggaaagtctatgtagcgacgggtgaaacgttagccgatcatttagaacgaacgggaaaccggatgaaaggctactctgatttaaacgtgattcaccggacagactggggaccgttaatggctgagaacagtcgcgtgtggaatgatgaaatcagtgcctatcttggcgaagacgggttagcgaattttagcgatttacaacgccatctgttcaacgcgcccgccgtgacttacttgacggttgagcgcaaagtttcgccatggatgatttatgacatgggggcttttagtcagtcgattctgttagccgcggctaacgaacaaattgatacaattcctgcctatgaaacggccaagtatccagatgcggtccgcaaagcaatgggtattccggaaaatgaactgttgattggtgggattgccatggggtaccgtagtgaagggatgattaatgcgtttcattcgcagcgtagttcggttgcgagttttttaacgattaaacattaacaaattaaaaaagcgttcaaatcgatttcagatttgaacgctttttttaattgacgtgatcgttcgcactgcccgcaaaatcgaggcccatgcgttcaagaataattgtggcagtttcttcgatcgaacggttggcaacattaatcacttggcaaccaatcttatcatacaggtcttgggcgaaagccaattcagctttaatttcgtccatgtctgaataagtggtatcaggatttaacccataagcaatcatccgttcccggcgaatgttattgaggacttctggtgtattcatcaggccgataattttcttaggatcaacccgccagatttcgtctggaatgtgcgcttgtggcacgattggtaagttggcaaccttgatattccgattggctaaaaagagcgacagcggcgtcttagacgttctagaaacaccgagcaacacgatatctgcttctaagaaaccgtgggggtctttaccatcatcgtacataacagcaaattccatcgctgaaatgcgatcaaaataacgatcgttcaaatgatgtagtgccccagcttcaccagttggcgtgctgttggttttagcagtaatcatttgtgtcattggtgacatcatgtcgaaactggcaatttttttcgcttggcaataggtttcggcgatttcagaaagaccgttagtggctaatgtatggaccacaattgtttcttcaggaaccgctttgcttaagacgtccatgagtttctcttgcgtgtgaacgaaggggaagcggacgagatcaggtttaacgtccggaaattgggcgagcgctgcttgtgctaattggagggcggtttggccgactgagtccgaaagcacaaaaacggttaatggtttagattctggcataaggcatgctcctttattcacttttatagcgctatcataccataattatcgaaaaaatcgctagatttgaaaaaatattcaattaattccctgtgggttattgaccgtattttcaacattcgctataatagcaaagaacggttcacgtgaagttaaatttttaacgaacgtaaacggttatacttagcacgcgaggggagggatatcatatgggcaagacagtcgttcgcagtaacgaatctctagatgatgctcttcgtcgcttcaagcgttccgtatcaaaagctggtacaatacaagaatatcgtaaacgtgaattttacgagaaaccaagtgtaaaacgtaagttgaaatcagaagctgcaagaaaacgtaagaagttctaatttcttagataaaggaaatgattgaatgagtttacttgaacaactaagttctgatttgaaaacggcgatgaaggccaaagataagttgcgattagctgttattcggagtttaaagaccgctttaactaacgccaaaattagtgcggggcaagacttatcttctgacgaagaattaagtgtactatcatcacaacttaagcaacgtaaggattcattagctgagtttgaaaagggcgatcgtgcagatctcgctgaacaaacaaaagcagaaattgaaatcgtacaagcttatttaccagagcagctagatgaagcagcagtggtcaccattgttgacgaagcaatgcaggctactggtgcgacaagtaaggctgactttggcaaggtgatgcaatatgtcatgcctaaggtcaaaggacgagctgatggcgctatggtcaatcaagtcgttaaatcaaaattaagttaattttaggcgggacttcctctggggagtcccgcttttttttatggtcgttaattcagattttgataattgaccataaattcgtgaattagcgcggctggctacttttaaaacggttgttgtttgtgatagaatgatggtagttttcattctaaaacaaatgaagttgaaacgtgcggttgcaacttgattcttcactttacgacgtgtagttaataatcgactaaagtcgtttatttgctgggctagataatactcagaatcagttgcagtcacactctggaaggagttatctttgttggctgaaacagatgagcgtttatttcaattggcaacgccaaatttagcggccgctttaatgggcacacacgatacttttttaaaaatcatcgaggaaagcttatctgtcgaactgattgcgtttgacgagcatattaccattcgcggcgaacaaccagcagttgaccaagccgcttctgttttagaaaacttagtggcgctgttacaacatggcattaagctcaatagtagtgatgtggtgagtgcgacgaagatggcccaaaaaggcacgattgctggtttccaagaactttacacggagccattaatcaaggatcgtaaagggcagcatattcgcgtgaagacattcggtcaacgtcaatacgtgaatgcgattcgtcaaaacgatgtcacgtttgggattggccccgccggaacggggaaaacattcttagccgttgtcatggccgttgcggcgttgaaacaaggattagtcgaacggatcattttaacgcgtcctgcggttgaagctggtgagagtttaggctttttaccaggtgatctaaaggaaaaggtggacccttatttacgaccgatttatgatgcattgtatgccgttttgggtaaagaacatactgaacgtttgttagagcgtggtgtcattgagattgcaccgcttgcgtatatgcgtggccgaacactagaagaagctttcgttattttggacgaagcccagaatacaacgcctgctcagatgaagatgttcttaacgcgacttgggtttaactcgaagatgattgtcaacggcgatattagccagattgacttacctaagaaaacaatgagcggcttggtgcaagctgaacatattttgcacgatattcctaagattgctttcgtacagttcagttcagaagatgtggtacggcacccagttgttgctaagattattaacgcctatgcggcgattgaaaagatgagaaagtaggaacacttgaatggatatccaaattatcgatgaaacaaaagtagttgcagaagcaaacgtaaaactggtcacggatattttagaatatgccgggcaacaattagatttacctgaagacacagaaatgtctgtcacgtttgtgacgaacgaacgcattcgccaaattaacaaggaataccgcgatactgaccgtgcgactgatgtcatcagttttgcaatcgaagaagatcctgaagaagaaggattaccagccaactttgaagaactattcgacattcccaagaatatcggtgatttgtttgtttcattagaaaaagcagctgaacaagctgaaacttatggacattcatttgaacgtgaattagggtacacaatggttcacggcttcttacacttaaatggttatgatcacattcatagtgaagatgaagcacaaatgattccattacaggagaagatcctcgatgaatttggattacaacggtaaaaaaccacaaacgggcaagaataaacatttttggcagtcactacgccacgcactcggtggattatggaccgcctttaaaactgaggctaatttacggcgtgatgcctggtttgcactcgttgcgattgctttcggtatttattgtcagttacattatttagattggttagtgattattttcgcgatttttatcgtttttatggctgaattttggaatacagttatggaacatctcgtggacttattagtcgatcaccagtaccatccattggctaagcagattaaagatatcagtgcagccagtgtcttaatcagcgcaattttagcgctattgattggcgccattgtctttggacacgccatatttaactaaaaaggggactattatgtcagaaacatatcgctcaggctttgtggccattgttggccgaccaaatgttggaaaatcaacttttatgaatcgaatgatcggtgaaaaaattgccatcatgtcatcaaaagcacaaacgactcgcaataaaattcaagggatctacacggatgacaacgcgcaaatcgtgttcgttgatacaccagggattcataaaccacataatgaattagatgaatacatggatcaagcagcgctatcgacgtttaacgaagttgatgccattttattcatgattagtgggattgataaaaaagggcctggggatcaatacatcatggaccaattgaagaacgtcaaaaaacccgtttatttggttgttaacaaaattgacgcgattcatccagacgatttattaccaatgattgaacaatatcggcatgaattagatttcaagggggtttacccaatctctgcattagaaggtaacaatgtccctgaaatgttaaaagaattggaacaaatactcccagaaggccctcaatactacccagaagatcaattaacggatcacccagaatatttcgttgttggtgaattgattcgggaaaaaattcttgaattaacgcatgaagaagtgccccattctgttgccgtggttgtggaacggatgaaagaccgcgtcaatggtaagctccagattgaagcgaatatcattgttgaacgtgatggtcaaaaacggattatcatcggtcaaaagggctccattatcaaagaaatcgggattcggtcacgtcgcgaaattgaagctttacttggcgaaaaagtcaacttgaagctctgggttaagattcaaaagaattggcgtgacaataaccaatacctccgtgaatttggttacaataaaaagagattgtaggcttaagcaatggcggaacatcgattcgaagactttaatggtctagtgatgtatcggaagaactataaagaaaaagatatgctggtcaagattttgaccgatcgctttggcaaaaagatgttttacttacgcggtgcgaataaaccgaagtttcgcttgagtgcggctattttgccatttacccaagctgagtacggtggcgacattcgcgatgatggcttatcctttttaaataatgtcaagtcggcgagtcagtttcaatcgattagcaatgacttgtttttaaatgcctatgcgacctatatcttaggcttagtcgatgttggttttccggatagcgaaccgctcggcagttggtatccgaagattgaacaggcactctcattaatcgatgaaggctttgacgcggcgatgattacgcacattatcgagattcagatgttacaagtcttcggggtgcagccacaactgcaagtctgtgcggtttgtgggcgttctgatttgccgtttgattattctgagagttatggcgggctgctttgtcaacgccactggcacttggatgttaatcgattccacggtagtcaacgggctatctattatctgcgtcttttttcagtgattgatttattcaagattcaatcggtcaacgtcaaacagacaacgcagatggagcttaagacgatgatcgaccggatttatcaagacacggttggcctatcgctcaagagtaagcaattcatcgataagatgtacagtttcgatagtcaattaccacaattaaaaaaagtgtcgtcagaaattgacagcacgccaaaagacgactaaaatagtaatcaacttaatagacgttgaagaaaagggtcccttaagacggtcagacagtgattctaggtgagtgagaactagaacaagacttgagtggattggcgtttcggagtcataccaatgaagcagcagctcgctttgagctgaagtagggtggaaccgcgagtaatcgtccctatgtgacttaacagtcgcataggctttttttatgcgcaaaatacggaaaagaggaattgaaatggttaaaaagttaaatgtgcaagaaatgattttaaccttacagcgtttttggtctgaaaaaggctgtatgctaatgcaatcttacgatacagaaaaaggagccggcacaatgagcccatacacgttcttacgggcaattggaccagaaccttggaacgcagcttacgtagaaccttcacggcgcccagcagatggtcggtatggcgaaaaccccaaccgtttattccaacatcaccaattccaagtggtcatgaaaccagccccattaaacatccaagaattttacttggatagtttacgggctctaggcatcgatcctttggaacatgacattcgcttcgtcgaagataactgggaaaacccatcaatgggttgtgccggtgttggttgggaagtttggttagacgggatggaagtgactcaatttacctacttccaacaagttggtggtttgcaatgcgatcctgtgacaagtgaaatcacatatggcgttgaacggcttgcttcatacattcaagatgtcgacaacgtgttcgaacttgaatggggcaatggcgtgttatatggcgatatttttaaagaacctgaatatgaacattcaaaatatgcttttgaagacagtaaccaagacatgcttttgaaattcttcgatgaatacgaaacagaagcaaaacgtttaattgacttaggccttgttcatccagcatatgactatgtcttgaaatgtagccacacattcaacctattggatgcccatggtgccgtttccgttacagaacgggccggttacttgtcacggattcgccggatggcgcactcaatcgcgcaagcattcgttgctgaacgtgagaaacgtggcttcccgctcttaaaacatgctcaagaatcaaacacggaggtcgttaacaatgactaaaccattcttattagaaattggcttggaagaaatgccagcccacgttgtgatgcctagcatccaacaactagaaaagcgcgtacgcgactttttagaagaacaacacttaacattcgggaccatcaaaacttacgcaacaccacgccggttagccgtcttgatcgaagacctagcggacaagcaagctgacattcacgaagaagcgaaaggccccgctaagaaaattgcgcttgatgctgaaggtaactggagtaaagcagcgcaaggttttgttcgcggccaaggtttaacgaccgacgacattacttttaaagcactaaaaggcgttgaatacgtctatgttgaaaaatcaatcatcggcaaacctgttgaaacaattttgccagaactaaaagccgtgattatggcgatgaccttcccaacgcggatgcactgggccgattacgacttcgaatatatccgtccaattcactggattgttgctttattagacgatgaaattatcgatttcagtattttaaacgttacgactggtcgcacaacacaagggcaccgtttcttaggtcaagccgtgatattggcaaaagcaactgattacgaagcaacgctggaagcacaattcgtaattgcggatgaagctaaacgccaaaacttaattcaaactcagattgaaacaatggcccaagaaaacgattggcaagtcgatttagacgcaaacttgttagaagaagtgacgaacttagttgaatggccaactgctttttatgggcaattcgatcctaagtatcttgaaattccagaagaagtgttgattacctcaatgaaggataaccaacgttacttctacgcacgcagccaagcgggtgatttattacctgttttcatcggtgttcgcaacgggaacaccgacttcatggaaaatgtcattgctgggaacgaaaaagtcctcacagcgcgtttggaagatgccgatttcttctaccatgaagatcaaaaggtaacgattgaacaaaacgttgcgaagttacaaaacgtgtcattccacgacaagattggtagtctggctgaaaagatgacccgtgttggtttaatcgcgcaattcttaggccaaaaatttggtttatcagaagcagaattagttgatttgcaacgggcaagtgatatttataaatttgacttagtgactggcatggtcggtgaatttgccgaattgcaaggggtcatgggtgaaaaatatgccttattacaaggtgaaacaccagccgttgccacagcgattcgcgaacactacatgccaattagtgctgaaggtgcactccctgcaacaaaggtcggcgcggttttagcaatcgctgataagttcgatagtatggctgatttctttgcagtgggcatgattccaagtggttcaaacgatccttatgcattgcgtcgtcaagcttatgggattatccgcatcttagaaaaccaaaactggcacttcccaatggccgattatcaagctgcgatgagtgacattgttaagcaacaagctgatttcaaccttgattggtcaaccaatgctgacgcgatcagcgatttcttaacggatcgtgttcgccaacgctttaacggcatgcggcctaaagtccggcgtgatatcgtagatgccgtcttgaagaatcaaagtcaagatccagtcgtgatgttcgaagctgccaaagtgctttcagaccatcaagatgatgcagatttcaaggcaacggttgaagccgtgacacgtgtgttacgactcgctgaaaaagttgactttgcaacaactgatttaacggttgatcctgcattattcgaaaatgaagctgaaaaagcacttcacacagcggtcgaagacttacgtggtacaattgctacgaacccattagctgataattacggcatcttacaaacactacgaccattaatcgaagcttactttgatgccacaatggtcatggctgaagatgaagctgttcgtcgaaatcgcttaacacagttgatgattatcgctcaaatcgcccttaccttaggtgatttaaacgaattgattgttaaataaacaattcaaaaggggataatagcatgttacaaatgaaacgggtttatgaagcagcgacagactcagatgggtaccgaattctagtcgatcggatttggccccgcggcatttcaaaagaacgcgccgctattgagacctgggcgaaagaaattaccccaacgactgacttacgcaagtggtttggtcatgagccagctaagtttcccgtttttaaagaaaagtaccttgctgaaattgcagctaatccagcttggccggcgtttgaaaaggtagtgcacgagcaccttgagctgggcaacgtcacattagtctatgcggcaaaggacctgcaatataatcacgttgtcatcttaatgggacttttgaaaaaggaccttgacaacgaatgagatagtttgctatatttatttgcaactgtacctaaatggtgctatgatatatagtgtatttttgtgctgataatccttaaaagtcgcatttcattgtgaggtgcggcttttacagtcttagtacaatttgaattgaatagtgaggtgagaccaatggcgggaaagattccgaatgacgtgattgatgatgttcggagccaaactaacatagtggatgttgttggtcagtatgtccagctcaagaagagcggcaataacctatttgggatttgtccgtttcacgatgagaagaccccatcattctccgttagtgaagagaaacagatttttcattgtttctcttgcggacggggtgggaatgtcttcaagttcttgatggaactggaacagattagttttccagaagctgttacaaaaatcgctgactttgtcggcttcagtttagcggagacttatcgacccactcaaaatgttcaagaatcaagtgaagtgacgcagtttaagcaactctatcgtcaggccaatgaactctttacgcatattttaatgagtactgaagcgggccaaccagcgttagattacttacacgaacggggcttgacggatcaattaattgagacgtttagtattggctatttaccggatcaaaccgatttaatgctttcattcttccagaataaagaagttccgtaccagacactacgtcaatccggcttatttattgaaactcagaccggcaagctgcatgatcgtttttccggccgagtgatgtttccgattcggaatgcgcaaggtgaagtgattgctttttctggccgggttttggtgaaacaaccagatcaacccaaatatttgaacagtcctgaaaccgtgatttttaacaagcggaaggttttgttcaactatgatttagcaaagactgctattcaccaagaacgcaaagtttacctgtttgaagggtttatggatgtgattgcagcgtattcagccggtgtttcaaacggtgtcgcttcaatggggacgagtttaacgactgagcagttgggaattttagggcaacaggctcgggaattaattgtctgttatgatggtgatcgtcccggaatcgaagcgatgaaacgcgcaattaccatgttgcagcaaaataccaagcttgaattgagtgtggtggttttgcccagtggcgctgatccggatgaatatgttcgccaatatggtgctgaacaatttaagacaaccttgcaaaatggtgctgaaacaccgattgcatttgaactgcggtatttgaagcaagggttaaatctggataacgagaaggatcaacttgattacgtgcaacaggcattgtccgtcgttgcgccaattgattcgccgcttgaaatcgagatttacctcaagcaaattgaagccgatagcggcattacccttgatacgttgaagcggcagttacaaacattgcgcgttaaacgggcaacgcagcaaccacttgcaccggcatctagtcagtatgattatgacatgccacctgaaccggatgacgcatttgtgggtggaccaccgccaatcattggtgatccgcgggcaacagcgacgcgtcagccacaacggctaacccgggttgaacacgcggagcaagaagtgttgcatatgttgatggctaatgacgatatgcgcctgcaattggagaacaatgccgattttagttttgtgcataccccgtaccaactgatttacgagttatggcgcgcctttttagctgaaggtaagtcgaccttggccgacttcatgggttatatcccagatgacttacaagccttagtcgttcagattgatgcgcttgacttaccagaagaggcaagtcaagaggcgttaaacgactgtctgttcgtcattgcgcaaaataacgttgaggaacaattaagagaagcgaaaattgccttaaaagaggcgaccaaattggggaatgcgagcgaagaaacgcgcttaaccctggaggtcattagacttgtttcgcaaaagaaattaggaaattgatattaggaggtttctgaatggctgataataaaaaagctgacacgaagaaatttgatattgcggttaaggctttaattaaggaatacaaaccaaagaaagaaatcaccaatgatgaactcgttgcaaaaatcgtgaaaccatttgcgctacaagctgatgaaatcaatgaattaatgcaaaaagtggaagaccaagggattgggattgtcgatgaagatgggaatccaagtgccgctacccttaaaaaggaaaaggtttctgctaaagaattaaaagatatgactgcaccaaccgggattaagattaacgatcctgtgcggatgtacttaaaagaaattgggcgggtatctcttttaaacgcccaacaagaagttgacttagccttgagaatcgaacaaggtgatcaagaagccaagcaacgccttgccgaagctaacttgcgtttggtggtttcaatcgctaaacggtatgttggccgtggcatgcaattcttggatttaattcaagaagggaacatgggcttaatgaaggccgttgaaaaattcgatcaccgtaaagggttcaaattctcaacatatgccacatggtggattcgtcaagcgattacgcgtgcgattgccgatcaagcccggaccattcggattcctgtccacatggttgaaacgattaacaagttaatccggattcaacgacaattacttcaagatttgggccgcgaaccaacgcctgaagaaattggtgctgaaatggatatgaatacggataaggtgcgcgaaatcttgaagatcgctcaagaacctgtttcccttgaaaccccaattggtgaagaggacgattcacacttaggcgattttatcgaagatcaagatgcaaccagtcctgaagaacatgcttcttatgaattgttgaaagaacaattagaaagtgtcctagataccttaacagaccgtgaagaaaacgtcttacgtttacgtttcggccttgatgatggtcggacacggacattagaagaagtgggtaaggtgttcggcgttacgcgagaacggattcgtcaaatcgaagccaaagcattacggaaactccgccacccatcacgttcaaaacaattaaaagactttttagaataaaagagtgcgtaagcaggcggctatattttgagggttagcatagtcaggcgaataaccaacgatgttggttgtttgactgacgtagctagccgcagaaatatgcctgctagagcacgttttcgataaagtgcgtttagttacgggagcaactgagcattaatacaatattgtcattaattcagattttagaattaatggcaatgttagattaagcggaagttgttgaactaaaaagcacgtttaggcaatcaataaaaaggccgcaagctaacctagcttgcggccttttttgcgtgtatctaaacaagcagagcaccaatccccactgctaaaaatacaatccccatcaatgcacctgaccataacgccatgggcatgaagactgaagtactgtggtttgcttcaaccttcaaagtcttgaatgttttaatggtcattgaaagttggaaaacaccgatgattagcattaaaatcccaataattggtaaccagttcatgttaccacccccttcactgtaaataatttatcttatgttaactaggatttccgaaaactaataaagctcaaaaagaaggggctaattgacgtttataaccaattcaataaactagcaagactaatcccaataaagacaagccccatgaaagcactcgaacagagcgctgctggcgcaaagacagaagtattttgatctgcgtgtaattttaagtcttgataatactgatacgacttataaatttgaaaaatgcctaaaccaatcatgaaaacacagaatagttgcaaccaactcatgagaccactccttaatgtatagaaagcgttttcgatttaatttcagtataaaactaaattttgcctaaagcaacttctgctatccagaatcaagtgttcactttgactgcgtatgccgtctaaaatttggtatactaactataacaatcaaagtttctagaatggagttttatttttgtcaccaattcatttatcaaagcgtttagctgcggttgcgcagtttgtcccacaagatagcattgttgctgatatcggttcagatcatgcatatttaccaatttggcttacggaacaaaaccggttgaagggcgccattgccggtgaagtagttgccggtccgtttgaatcaacacagactcacgttaatcaatggcacttacaacaacagattcaagtccgcttaggcgatggcgtcgaggtattgaatcctgaagaagaccatgtgagttgcatcgtgattgccggcatgggtggtttattgatcacggaaattttaacccgtggattggatcatctgaacggccatgaacgactcgtgttacaacccaatatcatggaaagtactgtccgtgaatggttgaatgcacatgactatgtaatcgttgatgaagcgattgtcgctgaagacgggcatatctacgaagtgattgttggcgaaccccaaccatcagttgcaccattaagcgaaagtgatcgagtgtttggccctgttctccgccaaacacaacctgctgatttccaattgaagtgggggacaatgttgaaaaaacggcgtcatttattgcaacaattacaaaacgcacaagtcgtacctactgataaagtcaaagcagttgaacatgaaattgcattaatcgaggagatgaagacatgggaaaattagtcgcgagtgacttaattgctgcgattgaagactacgcaccattggcattaaaagaaggcaatgaccccaccggttttcaaatcgggcgacgcgataaaagcattgaacgggtgttagtaacccttgatgtccgcccagaaaccgttcaagaagcgattgaacagaatgttgattttatttttgcccaccatccagtaatgtttcgcccagcgcggaatctcgatctaagtgatccgcaaaacaagatgtatgcggatctgttaacgcatgacatcacggtatatgccgcccatacgaatttggataagactaacggcggcatgaatgattggctagctgaagctttacaactaaacgatgtgcaaccgtttaacatcacggactaccaatcattagtaaaattggtggtctttgtccctgagtcacatgctgaacagatgcggatggcattgaatcaagctgatgcgggacatattggcgattatcaagcctgcagttttagtacgaccggaatagggcgttttcaaccaacggacgcagcaaatccttatatcggccaatcaggtgatctagaagcggttaccgaagttaaaatcgaagttgttctgccagtggccatgcaaaccaaagttgttcaggcgatgcttgcggcgcatccttatgaagaacccgtttatgatgtgattccattagctaatcaacaacaaccgattggtattgggcgcattggtcaagtcgctcaatcaatgacggtccgggattatgcgcaatttgtctgcgaaacatttgatttaacaggtctgcgcttaatttcaaatgaaccggacaaaatagttcagacagtcgccgttgtcggtggcgatgggggtaaattcttcccagccgctttacaagctggtgcggatgtctacattaccggtgatgtgtattatcatactggtcacgatatgttggcagctggtttgtcagtaattgatcctggtcatcatgtcgaaagtattgtgaaggataagatgacagaaatttttgaaaagtgggccaaacagcgtggttggtcggttacattcattaaatcacagcaaaaaactgatccgtttacatttatttttaatgcgaagtaggttagaatagaattagtattaaataatatctaggaggctacaccatggctaaatatgaaaaattgattcctcgttttctagaatatgtcacaactgaaacacgttcagatgaaaacgcaacaacgagcccatcaacccaaacacaagtggtatttttacacaaattgatggacgacttgaaggaaatcggattaagtgatgtgaaatacaacgaaagtaatggctatgtaacagcgctattaccaagtaatattgataaaaaagtgccaacaatgggctttttatcacacgttgatactgccgacttcaatgccaaaggtgtcaatccacaaatcgtcgaaaactatgatggcgaatcaattattaaattagatgatgcgggtaaattcgtattagatcctaaagaattcccaaatatgaaaaattataaaggccaaactttaatcacaactgacggctcaacattattaggttcagatgataagtctggggttgctgaaatcatgacagccatggacttcttagtccaacatcctgaaatcaaacatggcgacatcaagattggttttggccccgatgaagaaatcggaactggcgctgatcactttgatgccaaagatttcgcaaccgactttgcttacacaatggatggcggtccaatcggtcaacttgaatacgaaacattcaacgctgctgccatgaaagtcgatattcaaggtaaaaacgtgcatcctagtgaagctaaaaacatcatgatcaatgcccttcaagtggctgttgatttccaaaatgctttaccaagcgatgaagtccctgaaaaaacagacggtcgtcaaggtttctatcacttattaagccttgaaggcacagttgatgaagcacacatggcttacatcattcgtgatttcgaacgtgatggtttggaagaacgcaaagcatttgctgctaaagttgctgatcaaatgaatgctaaatacggtgaaggccgcgttgttgcaacaatcaaagatcaatactacaacatggcagaagtcttaaaagatcacatggacgttgttgatcttgctaaagatgcaatggaagccgttgatatcaaaccattaatcgaacctgttcgtggtgggacagatggttctaagatttcattcatgggtattccaacccctaacatctttgctggtgctgaaaacatgcacggtcgctacgaatttgtttcaatcgaaacaatggaaaaggccgttgatacaatgcttaagatgaatgatttaaacgttgaacggaactaatcaacaatctaaaaagccccgcacaaattgaatttgtgcggggctttttttgtgcggttaattttgatgcattgtcaacaagcctttgagttgttcaatgggtaattggcctggtgcactggggtgttcaaggtaaccgaaactcacagctgaaccgaattgaccaccaaaaatgcgagaggctaagccaaattcagacatcgccatcgtgatcagtggggttgtgtgatcatgtgtaaaagactgggtaatcgccattaaccgagtagtatcctcattactttgagcggtagttgctagttttaacatatctgggtgcgtcgcatgcattgctgcgagttgtttttgaagtgttagattatcaggggttgtctttaaatcatgatggcttagtaacacttgatagccattcgcacgtgcaagcgcgctgacggcttttctaactgcctcaggtaaagaccactcaatatcaaccacatcgccgatttgagccgataatagagctgtatagcggtctaaatagtcggttggatcagacaggccgccatcatgggttgttctgagcgttaaaataacggggtgcttgcaggcggcaatttggtgaccagccgttaataaggtcgctggtgtttgccaatagtctaagcgccattctagaatatcaatcgcagcttgcttttgctcaacgagtaccatttcacgcacacaatcgtctaggttacgcggcattaaggaaacggccgtttgtgtctggtcagtgccaacatggagggtcatcaaatgacctcactttctaatcaaaatggataaacaatttttaaatcgataaggtctattttaagagaaaaagttgtttaacgcaataaacttaaccaattaaataacaaaaaagaaccaccaactggtagctcttttatagggattgattaatatgagcgacacgatattgaccatcaattaatttaaacgttcaaatttcgctgaaacgttcaatataagccgcttcacgacgttggtcattaaccgtggctgtctgccgctcatcagtgaagtaatcgcgcatttgcgctgtcactagaatatcttggcggttcggtttttcaggtaataataactcagttgaaacaatggcgatactctcaagttggttatgtttatggtgccgttgataacggtttaagatgcgttgttgttggtgctgaaaatggggcgtcattaagtccgccacgttgcttaagtcatttgagggccaagctgtttcaatttgatagaatgcattttcaaagcgcgccgcggtttcagcatctaacggcatggtatcagccagtgcccgttttctacgtccggttaaccagtcacgcactttacgccaaatcatgatcccaagggagacgaatacgaaaggcagggtgactatactatcgaataaacgacgcattagggacttgtagtaatgccgacatcccgcatcatcgtaataataatcacgactacggccgccaacataactggatgtcggtgaagacccaccaccgctaccacccgaaccaccagagccacccgaagatccgccagcacgcgcagcaactggacttggtaataataattatttaagatgggggagttcagctaataataattcgctagcgactaatccgagtaggctgacaataacgtatacccagtgagaaccactaccccagctgaatagataagcatcaacaccaactaaaatgataaagagcacgcaatttgtgattaagccaattttgaaagtcaattgactagcaataacggcgaataaaacgattgaaatgaaaataatgaagaatgcagaaatcaaagtgacgaccacctaacgctatccgatttgaaatactacgctcattttactataaccgcagacgaacaacaattaaatttgtgggagataaagtttactttttgggtgttcgttaacagaatcttcaaatttacagtgtacactaggggatattcaactgatcaagggccgttatcaagccgattaatggacagacttttcactgagcggctatactattgacaggtgaatttaattaaaagattgggggaactatcagatggttcgtgagacagatttacgagcacaagatccacgtgttcaacgaacaaagcaacaattacgtcaagccctcattatcttgctgaaagacagtacaccaaaggggatttcgattcaagcaatcaccaagcaagcggcaattactcgcgggaccttttatctccattatgaagataaagtggatttcatccgaaccgcggtggccgatttggtggccgatttttatcagcaagtgactgtagtggtcgatcagacatatcgtcaggtcagtttacaggcactttttgaatatgttgaacaacaacaagctgcttttaaagtgttctataaaaatgaggcgacgcttcactttcaggcacaactgactgaatcaatgcgccaattaatgcaggattacgtggctaaacgctataatcagacttcacaggctgatcaaattgagatgagtattacgattgattatttagcggtggccagtttagcgttggtctttaagtgggtcaatgacgggcttgtgtattcaccacgctacatggctaagatgttataccaattggtacaaacacctaatacgacgtttgatgtcgcacaattttttgtcgaggcgtaataaagcattgactcgccctgtgatattcgatataatatgaacgttgtaattgtgagctccacagctgcaaccgcgcatactaaggcattaagtactatgattagtcaccttagttggcgagtctaagaaaaaataggaggtgcacacatgtacgcaattatcaaaacaggtggcaaacaatataaggtagaagctggtcaagcaatctacgttgaaaagttagccgcagaagctggcgaaaaagtaacttttgatcaagttattttagttggtggtgaaacaactaaggttggtacaccaaacattgatggtgttactgttgatggtactgttgaaaaacaagggcgcgaaaagaaagttgttactttcaaatacaaacctaagaaacacagtcatcaaaagaagggtcatcgtcaaccatatactaaagtgatgatcgacgctatcaacgcctaattgagggaaataagatgattcaagctgactttacggtcaatgccgattcgcaaattatttcttttcaaattacgggtcatgccgactcgggtccttacgggagtgatatcgtctgtgcagctgtttctgctgtctcaatcgggacaatcaacagtttgcaaaagcttgctggttttgaaccagaggtagaagcagataacctgaatggtggtttgttaacttgtcagattccggcaacggtttcgggccaagctttagcgacagctcagattctcttgcagaatttgcagttgacgcttgaagatattacgcaacaatacgggcagtacattcaagtacaaacaaaacgtaaatagacagttaataaacaggaggtgcatttagatgttacaaatgaatttacaattcttctctcaccataagggtggcggttcaacaactaacggccgtaactctgcaggtcgtcgtttaggttctaaacgtgctgatggccaaactgtaacagctggttcaattctttaccgtcaacgcggtacaaagattcatccaggtgaaaatgttggtcgcggtggcgatgacacattatttgctcttatcgaaggtgtcgttcgtttcgaacgcctcggtaaaaacaagaaaaaggtttctgtatacgctgcagaagctaaataatttttctcacacccactttatgtgggtgttttttttgtgcgagagaagcggggctgtcgtcacattctaaacgtgttccatcagtcatatctctccggttaaccctgagtcacaaatgattgttccacaatcttttgcaactctgtgttaatcctctagatatcccagactgatgtcacactctgtttgtgtaaatccagttttactggtatactaattactcaggcaacaaaccattgacaatctaaaagtgagtgttcagatcgacttttgctcgattgaatacgctaaaagggattggcgggtgccggtccctttttttatagctacttttagggataaaaggctagaaatacttgcttttgagcctgatttcttgctatgattaggacaatggcatacttatataatgctcggaggataaacaatgttatcagtaaatgattttaaaaatggcttgaccattgaatttgacaacaacctatggcggattgttgaattccaacatgttaaaccaggtaagggtggcgcttttgtccgctcaaaacttaagaatttaagaacgggtgccaatcaagaaaagacattccgttcaactgaaaaagttgaaaaagcaatcattgatacaaaatcaatgcaatatctttatgcagatggtgacaaccacgtcttcatggatactgaaacttacgaacaattagaattaccagcagcacaaatcaatgatgaattgaaatacttgaaagaaaatatgcaagtttctatcatgatgtatggtagtgaaaccttaggggttgaattaccaaacacggttgatttagcagtggctgcaacagaacctggtgttcgtggtgatacatcttcgggtggtactaaaccagcaacacttgaaactggcttagtggtccaagtaccgtttttcgttaacgaaggtgatttgttaacgattaacacatctgatgggagttacatctcacgggcataggctaaattagcaagaacttgttaggaggggtttcgatggcagaagaaacaaatattgtacttgatacacaagaaaatgcattgggcaagattcaaatggcacctgaagttgtggaagtgattttagggattgcagcaagcaagattgatggggtccaccaaatgcgggggacgttatcatcatccattaacgaattgtttggtcgttcgaatcacggtaaaggggtaactcttaaggtgattgatggcaaagtgaatgcggatgtttatgtttatctgaactatggtgtttctgtgccgaaggttgcccttgcgatgcaagaagcccttaaagaacaattattgttcatgactgatttagaactagcagaagtcaacgtacacgtggtgggcgttgtcactgaaaaagcaccaaaaattattgatccagatgacttatttaacgatgaaacacctgatcaaaatggagaccaatcttaatgcctaattttaaccgacaccaaattcgccaagctgcatttcaagtgttgtttgcgttaaatgctaatgacacattagaattggcagatgcttaccaagccgttttaaccatggatcaattcgatgctgaagaagttgaagaagttgctgttccagactaccttgccttcttggtaacgggcgtcacagaacatcaagcagaattagacgccgctttaacgccatacttgaagaagggctggcaactatcacggttagccaaaccggatttaattatcttgcgtttagggttgtttgaaatgcaaaattcaacagaagcacccgataaagtggcgttgaatgaagcgctcgaacttgctaaacaatttacagatgatcaagcaaaaggttttatcaacggcgttttatctaaattcgttgaagcttaattagtaaaatacgaacgaaatcacttaaaacacgttaaaaagtatttttttagcgtgtttttttgaatttaaacggtcattatcagctgataacccggaattaaccgattaactatgctaaaatagaaacatcaaatatcgataaataggggttgttaactttggaattactagatggtcgagcacttgcaaatgaattaacacaagcacaacaaatggcggtggcaacactcaaacaacaaggggtaaccccgaaattagtggtcgtcatggtgggtgatgatccagcaagtgcgatttatacgcaaagcaagcaaaaaagagcgactaaaattggcatggcatctgagttaaaacgcctgtctgctgaaacaacggaagctgatttattagcggttgttcgccaactaaatacggatgaaaccgttgatggcattttagtccaattaccattaccaaaacaaattaatgaagaccatattatccgggcgattgacccacaaaaagacgttgatggttttagcccagtcaatattgggcgattatggcttaatcaaccgggcttagtggcctgtacgccaaatgggattatgcgcttattggcagctcacgatattgacgtggctggcaaaaatgtcgtgattgttggtcggagtaacatcgttggtcggccattggcagccttgatgctcaatgccaatgccacggtcacgattgcgcacagcagaacggcagacttaaaagccctaacgaaaacagccgacatcttagtggcggccatcggtaaaccacacttcttcggcattgaggatgtcaaagaaggggcggttgttgtcgatgtcggcattaatcggcttgaagatggaacagtcaccggtgatgtcgattttgaagcccttaaatcacatgttagtgcgatgacgccagttccgcgtggcgtggggccaatgacgattacgatgctcatggatcaaacgattgagattgcaaaggaacgtgctaaacgtggttaaaccaacagactatttaacagtcaccgcattaacgcagtatttaaaggctaaatttgaacgcgatccgtatttggatcgggtttatttaaccggcgaaatttcaaatttccgcttacgaccgaatgcgcatcaatattttagtttaaaagataataaagctaagatcagtgccattatgttcaagtccgcttttgaaaagattaagttcactcctgaagaggggatgaaagtgcttgttgtgggccggatttccttgtacgaagcaactggaaactatcagatctatgtggaacggatggagccagatggtcttggtgcattgtatcaagcctatgaacagctaaaagctaaattatcggctgaaggcttgtttgatgcaccaaagcaactattgccgcgctttccaaaacggattgcggtgattacgagtccttctggggctgttattcgcgatattataacaacgacgcaacgtcggtatccaattgcccaactcgtcttattcccagcggtggttcaaggtgacggtgcggctgatattttagtcgatcgactgaatcaagttaatcaacaaggggatttcgatacaattatcattggtcgtggtggtggttcgattgaagatttatggccgtttaatgaagaacgcgttgcgcgcgcgattgttgccagtcagattccggtgatttcatcagttggtcatgaaacggacacgactattgctgatttagtggcggatgttcgggcagcgacaccaacagcagcagctgaattagcaacaccggttttgacggacgaagtgttgaagttgcaacaacaacgtttgcggttatatcaggcattttcgaaaacattggcattaaacaaaaagcaattggtccacttacagaacagttacgtcttaaaacagccgcaacgcttgtatgacggctatttacaaaatgtcgatcagttgcaccgtcgtttattgttggcgcaacaacaacgcttacagactagtcaacagaatgtacaactcttgcagcaacgcctgcagtcgcaatcaccaagtggtgcgattcaacaagcacaaagaatgttgactgataccgatcatcgtttgaaacgagcaatcgagagccttgtccaaaatcggcggcaacaggctggacaagcggtggcagccttggatctcgtaagtccgttgaaaattttgggacgcggatttgcttatgtaacggatgataatcaaaatgtaatgaaaaaaacgaccgattttacggtcgaccaatcaatcgagttacatgtccaagatggcctcgtgaacgcgcgtgttacggccactcataaaggagacgaataagatggcagaaaagaaattaacatttgaagagaacttagcacaattggaagcaattgtgaatgaactggaaacgggcgatgtgccacttgaaaaagcgatgactgcttttcaaaagggtgttaaattaagtcaaacattagaagaaaccttaagtaaggctgaaaaaacgatggccaaagtgatggcagataatggcgaagaagtcccattggatgctgaggcacaagaataatggttgatttcaaaacgttcgcgcgccaacaagtgcccgcatttgaaacctatttgactgagcaacttgcccagattgaagaaccaaccttgcaaaaagcgatgacctattcagtgatggctggcgggaaacgtctccggccacttttggtatttgcggtgcttgcaagtgtggggcgaccgattaatcaaacggcgtatcgcgtagcgggggcattggaattaattcatagctactcattgattcatgatgatttaccggcgatggataatgatgacttacggcgcggtcaacctacgaaccataaggtttttggcgaggcgcaagctattctagccggcgacgggttattgacacttgcatttgaatggttaacgacgaccgatttgacgactgatcagcagagccgtactgttcgattattggcgcaagcagccggtccaagtggcatggttgctggtcagattgaagatatcgaaggacaaactaaaactttatcgttagctcaattgaaacaagtccatcagctcaaaacgggccgtttgattgaatgcgcggtcggcttaggggcgattttggctgatttatccgatgaacaaatggctagtttacagctttttgcgcaaaattatgggttggcatttcagatccaagatgatattttagacgtgacaagcactacagaagcgatgggcaaggcggtccataaggatgctgacgaacataagaatactttcccaggcttattgggcttagctggtgcaaaagacgcgttggatgagacttgtcaggccgcgcaaactgctttaacggatttatccgggttagataaagcactattaaatagttttttaaactattttaatgaataggagaacagatgaaaaaagaacgggtagacgtattattagtccaacagggattatttgattccagagaacaagcaaaacggtctgtgatggctggtgaagtgtacggtaaaaatgatgaacgaatcgacaaaccgggcgaaaaaatcgacgctgaaactgttttaagtgtcaaagggcgtaagattccgtatgttggccgaggggctttaaaattggcgaaagcggtcgaggttttcaacatcgatttacaggataaaatcgcacttgatatcggttcttcaacagggggctttactgatgtggcgcttagaaatggggccaaactctgttacgcactagatgtgggttataaccaactagcatggaaattgcgcgaagatccacgcgtcgtcgtgatggaacgggttaattttcgttacagtcaaccagaagatttcaccaatggtcaaccagattttgccatgacggatgtttcgtttatttcgttacataagattttggtgccgttgaaacccatcttgaaaccggactgcgaagcggttgctttaattaagccgcaattcgaagccggccctgaaaatgtcggtaaacacgggattgtgcgtgatccgaaagtgcataagatggtggttaaagacatcgttgattatagtttagcgacaggctacgacgtgctagggttagatttttcaccaattaaaggtggcgaaggcaatattgaattcttgattcatctacggaatacgacggctgagactggaacgatggcccaaaacgtgaatattgatacggttttagagaatgcctatgctgctttgaaacgaccaacgggaaaatagtgtataaaactttgtattttatgtataaatgcgctatcattgaggaatagaataatttctcacatgaagagggtgttttaatgcgcaaggtagatcggcaacgactgttaaaaaatttaatccagacccatgagattgaacgacaagaggattttgtgaagctgttacaagcggaagacatcgatgttacgcaagccacgatttcgcgggatattaaagaaatgcagctcattaaagtgccaaatgcggacgagggctatcactatagcctaccgcctgaaaagaaattagacgttaaagaaaagttgcgtcggattttacgtgacgcctatattacgcataaccaacaagactattttgtcgtgattaaagccttaccgggtaacgggacggcaattgctaatcttttggatcaaatgcagctcagtggtgtatttggtacaattggcggcgacgacaccgtgttggtgatttgtaaatcagaagaaaatgctaaacagtttacgaagtttattgaagacttgctaaagtaatttggcaagtttttttagcatcaagagaaacgaaagggggatgatcagatgttacaagagttggtcattcacgattttgcaattatcgatcagttagcaattagttttgaagaagggatgacggtgctctcgggggaaaccggagccggtaagtcaattattatcgatgcagtcgggttactcgttggtggccggggttcacaagactttatccggactggtgctaaaaaagcgacccttgaaggcttatttacgatgacgcctaatggcacaaccgccgcagtattagaccagtttggcattgaacacgacgaacaaaccgtcttattacagcgtgatttagccgttaatggacacaatgtttgtcgggtcaacggtcatttggtcaatacaaccactttgaagcatattggggaaaccttagttgatattcacggtcaaaatgaacaccaagaattaatgtatccagatcgccacttggggttgttggatgaatttgcgcaccaaaagttaacaaccgcgaaggcagcctatgccgaaacctatgctgcctatcgtaaagcacagcgtgccttgaagcaaaaacagcaaaatgaacaagaatgggcccaacgcttggatatgctgaaatttcaaactaacgaaattgatgcagcccaattacaggctgatgaagaaagcaagttagtcgaagaacgagccaaactaatgaactttcaaaaaattaaccaagcgttgcaagccagtcacacgattttagcaggagaagacgggaatgcgttagaccaaatcgcagttgcaatgaatcagatgcaagaaattgctgaactcgatccagaattcaagcgtattgcggacagtctgcagactggttattacacgttgcaagatagtagcattgatattagtcgggaagtttcaaacttagaatgggatgaagcacggttagatgaaatcgaacaacggctagaaactattaataatttggaacataagtatggtgattcaattgccgaaattctcgcttatggtgaaaaaatcggggctgaactagcagcgatgcaagcaactgaagcgaacgcaagtgagttggagcagcaattcacgcaacttgaacaacaacttaggacaaacggacaaacgttgacacaattacgccaaaaagcagctaagcaacttgaaaaagcggttcatcaacagttaaaagcgttatacatggaaaagacggtctttaaagttgaattcttgccaaatgaacaggaacagttcatggcctccgggatggacaaagttgaattttacattcaacccaaccctggtgaaaaactacggccgctcgctaaaattgcttctggtggggaattatcgcgcttgatgttagcccttaaaacgattttctccgaatcacaaggcgttactagcatcatctttgatgaagttgataccggagtgagtgggcgtgtggcccaagcaattgccaataagattagtgaaattggccaacattcgcaagtgctctgcattacgcatttgccgcaagtcgcagcaatgagtgatcatcagtatcaaattcaaaaacaggtaaaacaaaatcgaacggaaacgtccgttcaaaaagtaaccggtaaacaacggattgctgaactggcgcggatgttagcggggactgaagtaacagagttaactttagaacatgccgaagaattagtggcattagcggaaacggctaagcaaagtcgccgacattaaaataagggtgcagccaaaatatttttttggctgcacccttatttttttgcttaacttttcttttgaatgtaacgaatttgattgcaaaggacaatcttgtagaggttcgaacgacactcttttagcagatacttgttcgcactgagttgtttaaccaagcgcccggtcacttgttcgagatgatcgttaacattgaattgcaccgcaacatggtagtggcgttcaaacgcttgggtcataaataattgaatctgagcaggttgcatttggggttgttcaacaaaagcagtcgcttctggtgtaagttcaaaaaagcggtgatattgtttaaccaattgttgactgagtccgctaaccgttgcttgtttaaattccatgatttcatcctccgaacacttgtttgtgtttttattatacgaacaaatgttcagaattgcaagcggcattttttgatttttttcgtgtataataggatgagctgatagaaagggtgatttgatgggcaaaattgaatatgaaattatggcagaaatcggtgtgttgagtgaaaatccagccggttggcgtaaagaattgaatttaatctcttggaatcaacgtgcaccaaaatttgatttgcgagattgggcaccggatcatgccaaaatgggtaagggtgtgacgctgtcaaacgacgaaattgcgtccttaaggttaattttaaatgagatggaaacaaagtagacttgaaatttcccgccaaatagtgcaaaatagactttaactattttataaaagaagagggaattacgtagatgtccaatcgaggaatgttgatcgttttatcaggcccatcaggggtcggtaaaggaactgtccgtcaagcaatgctagaagatgaatttcgtgattttcactattcagtttcgatgacgacgagaaagccaagaccaggcgaacaagatggtgttgactattattttgtgagcaaagaagaattcgagcaagaaattgcaaatgatggtatgctagagtatgcacagtacgtggataattattatggcacaccgatgaagtatgtgaatcagacactagactcagggcgcgatgttttattagaaatcgaagtccaaggcgcaatgcaagtgcgcgagaagtgtcccgatggcgtcttcatcttcttgacaccacccgatttattagaattgcggaatcgaattcaaaaacgcggcacagacgatcaagccacgattgataagcggatgcaaaaagcagccgacgaaatcaagatgatggaaaattacgattatgctgtcgtcaacgacgaaattccaaatgcggttcaacgaatcgaaaagattatcgaaagtgaacacttacgagtgccacgtgtgatcgaccaatacaagaaaatgataggggaataataatatgattgtatatccttcaattgataagttactagaaaacgtgaactcacgttactcattggctgttttagctagcaagcgggcccatgaaatcgaagccggtgatattaagatgttatctgaatacaaatcacctaaaacggttgggatggcaatggaagaaattgctgctggcaatgtcattattgatcctgattcattgatgcttgaaaaagatgctgaaaaaatggataagctcgctcaaaaagacggcgaataagaataattaaagaacctgcatgtttagtttattcatcgatggatgtttaaattaaagtgcagtttttttagttttagggggttttgaaagtggatttaacgaataaacgaattgcagtttatgtgacaggtggcattgccgtctacaaagtggctaatttggtgcgcggattgattaaagcaggtgctgaggtccaagtggcaatgactcaggcggcaaccgaatttgtcacgccactgacgtttgccacattaacgcgtaaacccgtgttaactgatttgtttaatcaagaccaaccggatcgggttgcccatattcacttagcggattggactaatctggcggtgattactccggcgactgctaatctaatcgggaaactcgctaatgggattgctgacgactttgtctcgaccgccttgttagccactaccgcgcccaaattaattgtgccggcgatgaatgaacatatgtggtttaatccagctacccaacggaatttaacccaacttaaagcagatggctatactgtcatggaaccggataccggctttttagcggaaggctatgctggcgtcgggcggttccctgaagaaaccgcgattatggcagaagttgcgcaacaattcggaccgcaacggttaagcgggcagaacgtggtggtgactgccggtgggacacaagaaccaattgatccggtacgctacattggcaaccggtcttctggtaaaatggggtatgcagtggcccaagcagccgtgacgatgggggcgaatgtgatcctcatcagcacgcgtccagaattgccagtcccggctggtttgcacaaaataatttacgttgaaacggcggcgcaattacaaggcacagttagcagtgtctttgaaggggccgatgttgtggtgatggctgcggcggttgccgattttaaaccggcccaatatgtcacgcacaaaatcaaaaaacaaccgaacacaactgagatgcagttaactttagaccgtaccccagatattttggcgacgcttgggcagcagaagacgcatcaattcttggtcggattcgcggcagaaacagatgatttactacaaaatgcccaaaccaaactagcagctaaaaatgttgatttactcgtggcgaacgatgtcagtcagcatgatcggggctttggtgttgatcaaaatgcggttacgcttttacaaccgaatgcagcaccggaaacattagcgttggcggataaaagggtgattgcgactcaaattctagaacgagttgctgacttgttagattaactaaaaaggaggatttagatgccacaaatcgcaaaagtgattgtcgatgtgccgacgatgcaaactaatcggccatacgattaccaagtaccggatactttatcagacagtattcaacctgggatgcgtgtggcggttccttttggcaaaggtgatcgattaattcaaggctttattttgtccattcaagatcaagccaattttgaggggcaattaaagccgattacggcggtcattgatttacaaccggctgtgaattcagaattacttcaattatcaagttggttggcagagcggacctatgcctttcagattacgtgcttgcaaacgatgctcccaagtgtgatgcgtgctaagtattctaagaccgcgcaactagttgatgaaattgatccagccttacaagcaagcctgttcaatggtaacgacgaattaacgtttgaccagtcgctagatcccgaaaagttaaaacaattgatgcagttacaacgccaagggaaaatcgaagtggtctaccatgtcgatgatcgcgcccgcgtgaagcaattaacggcgattgaaccggcattatcgtttgaacagttagaagaagcgcgggccggcttacgtaagtcagcgcaaaagcagagtcaactcattagttatttacaaagtttaattgatcagcccaatcccttattaaaggatgttttggccaagacgacttttacccgggagaatatcaagacaggcgccgacaaaggttggttacgccaagttaaagttgaagcttaccgaaatccttatcctaaaaccgtcacaacgacgcaaaaaatggcgttgactgatgaacaggctgatgcggtagaagccgttgtagcggctactaaggcccaatctgatcgggtttttctagtcgaagggattacgggcagcggtaagaccgaagtctatttacaaacgattgatgcggtcttgcaacaggggaaaactgcattaatgttagtccctgaaattgctttgaccccgcagatggtcaaacgcgtgaagggtcgctttggtgatcaagttgccgttttacatagtggcttatccgaaggtgaaaagtatgatgaatggcggcgaattgaacgcaaagaagctagcgttgtcgttggggcgcgctcagccgtttttgcaccattggagaatattggtgtgattatcatggatgaagaacatgaagcttcctataaacaagatgaaagtccgcgctatcatgcccgcgatgttgccatctggcggagtcagtaccatcattgcccagtgattctcgggagtgcaacaccatcgcttgaatcgcgtgcccgtgcccaaaaaggcgtctaccaactcttgcgcctgacgcaacggattaatcaacagccattaccggcagttgagttggttgatatgcgcgaggcgatgaagcaacaagccagcagcaatttttcacctgcgctattagatgcgttaaaggatcggttgcaaaagggcgaacagagcgtcctcttattaaatcggcgcggtttttcatcctttatcatgtgtcgcgattgtggctttgtcttgcagtgtcccaactgtgatatctcactcacgttgcatatggatacgcactcgatgaagtgccattactgtggtcatgaagaagcaattccgcggacttgtccaaattgtcagagtcgccagattcgctatttcggaacgggaacacaaaaagttgaagcagaactccaagagctgattccaaatgcccgtattctgcgcatggacgttgatacaacccgcaaaaaaggtgcgcacgctaaattactcaaacgctttggcgaccacgatgccgatattttattgggcacgcagatgattgccaaagggcttgatttccctgatgtaacgttagtcggcgtgattaacgccgataccgcccttgggttacctgattttcgggcaagtgagcgcacgttccaattattgacgcaagtcagtggccgtgctggtcgtgccgataaaaccggtgcggtaatcgtgcaatcttttaatccggaaaattacgccatccaatttgccaagcaacatgattatgaaggcttctatcagtatgagatggcagtccgccatcggggcggctatccgccgtattattttacggtacagttaacgattagccatcctgaagaagcgttggcagccaagaagagtttccacattgcccgtcaattacggcccgtcttatccgaccaagcgattgtgctgggtccgacgccgaagtcgattgcgcggattaataatcgttatttctatcaaattgtgattaaatataaacaggaaccacaacttcaggcgaaactcgccgagattctcgaaacgacccaaattgatacccgtcatggtttcaagattgggttggacaatgaacccctacaatttacttaaagtgagcgtgattgattaatgacatccatcgtatttatggggactccccaattttcagtaccgattttagaagcccttgtggcacacgattatcaagtcctagccgttgtgacccaaccagaccggaaagttggccgcaagcaagtcttacaacaaacacccgttaaagaagcggctgttcgcttaaacctgactgtttttcaacctgaaaaactcagtggtagtcaagaattagcggacgtgatggccttgcaaccagatttaattgtgacggcagcatatggtcaattcttgccaacgaagttattagaagccgctaagattgcagccatcaatgtgcatggttcactcttgccaaaatatcgtggtggtgcacccattcaatatgctgtgttaaacggcgattcagaaattgggattaccatcatgcatatggctaaaaaaatggatgccggtgatatgattgaacaagccagcattccaattgaagcttcagacgacaccgggactttatttgataagttaagttatgtcggtcgagatctattattgaagacattaccaagcattatcgatcaaaccgcgccccggacaccacaagatgaagcacaagtaacgtttgcttacaatattactaaggaacaagaacaattagatatcgagcaaccagcaacgcaactggtcaaccagattcgtgcgttacggccacaaccaggcgcttggttgccaattaatggtcaacggacaaaattatggcaagcaactgttgctgaaacaacgacggatcaaccagccggtgtgattgtcgctatcaacaaaaaggatttcgaattagcagccggcaatggcagtgttttgaagattaccgagattcaaccagctggtaaggctaaaatgccggtccaatctttcttaaacggggttggcaaacaactcgcagtcggacaacaagtggtggtgcaagatgcctaaaaagacaccacgctatttagctgttgaaattttaacggcggttgccaaacaaaacagttattcaaacttggccctcgaccaagtgattaaacaaaaccacttgaatccccaagatgctggttttttaacgcagctcgtgtatggtgtgattcaacatgaaatgacactcgattattacctagccccctttattcaaaaaccagctaaactggcaacttgggtccgccaagtcttacggacggcagtttttcaacaggtttatttggatcgtgttcctgaacatgcgattttttatgaagcaactgagattgccaaacaaatgggccatgctggcacggctaagttggtcaccgcaattctacggaaccaacaacggactggattgcctgatttagcagcaattgccgatccaatcgaacgcctaagtgtgacttacagtatgccgcagtggttagtggcgaagttccaccaagaattagggcaatcaaaattggaacacttattggcaacgattaaccaaccagcgaatgcgtccattcgagtcaatacccgtgttaattcagttgatgccgttttggcagacttacaggctgacgggttaacgattgaatcgagtgtaattgtagccgctggattagttgcccacggcggtcacttagccagcggtgaattgttcgaacaaggcgcgtatataattcaagatgaaagctcgatgttagtggcaccaagtttgcaactacaaccaagtgatcggatcttggatgcttgtgcagccccaggtgggaaaacgacacatatggcgacttatttggatgccagtcaaggggggcaaattactgccttagacattcatgaacataaagtccgcttgattgagcaaaacgctaagcgtttgcatgttgcagacgtcattgatgcgcgggcgctcgatgcacgcaaagtcggtgaacaatttgaacctgaaacatttgataagattttagtcgatgcaccatgttctggcttaggcttaatgcgacgtaaaccggaaatcaagtatggtcgccaagcagcagacttattgaaccttcagaagattcaattggcgattttagaagccgttgcaccaaccttaaaagtgggtggtcaattgacttacagtacctgtacgattgtcccagaagaaaatcaacaagttgttgcggcttttgtggccaatcatccagaatttgaaatcgtaccagtagcactcgacaaaccattgccagccaatcaagcgacaccgtttgtccaaatctatcccgatgattatcaaacagacggctttttcatcgcttgtttaacacgacgggcttaaattattaattgaggtgaattcttatgaaagttgcttttcaaaccgatgtcggccaacaacgccaaaataatcaggactatgtcggcttttataccaataaaagcggtgcgcagtttgcgattgttgctgatgggatgggcggtcatttaggcggcgatgttgcttcagaaatggcggtttcccatattgggtacgagttcgaacgaactgatgataccgacattgaatccatggttaaatggttaattttcgaattacaaaaagaaaacaaacatattttagcgaaggctaatcagtatgatgatttgtttgggatgggcaccacgctcgtcgcagtgttgatttcaggtgccaattacttagttgccaatattggcgacagccgagtgtatcgcttccggaataacgaactccgccaattaacagaggaccattccttggtaaatgaattggtgaaacaaggggagttaaccgaagaagcggcaaagcatcatccgcaaaaaaacatcattacgcgcacattaggcgtttcgcaagatgtcgatgccgatgtaacaatttacgaatttgaaccagatgattatctattattatgtacagatgggctaaccaatatggtcgatgatgaacaaattaagaccacgctgatgacaccgacatcgctggaagaaaaatgtgcggcattaattcaacaagcaaatgatgccggtggcttagataatattacggcgttaatcttacatcaaactggtgaggagggtgcgcgatgatggagacaggctacgcggtcaatggccgctatcagattatccgtccaattggagaaggtggcatggccaacgtttatctggcccaagatctgattttggatcgccaagtagcggtcaaggtgctgcgacttgatttacggaacgatccgaacacggtacgtcgctttaaacgcgaagcacttgccacaactgaattgaaccaccccaatatcgtcagtatctatgatgttggtgaagaaaacagcatgcaatacatcgtgatggaatatgtgaagggaacagatttaaagaagcatatcgttgaacacttcccgattccttatcaacgcgtcgtcgatattatgacgcagattttatcagcggtcgaaaatgcccacgcgcacgatattattcatcgtgatttgaaaccacagaatatcttggtcgatgaagcaggtaacgttaagattagcgattttgggattgcgattgcgctcagtgaaaccgcgatgacccagaccaatacattactcggatcagtgcattatttatcaccagagcaagcacggggttcaatggcaacgaaacgttcagacatctattcactcgggattattctgtatgaaatgttaacgggtatggtgccatttgaaggtgaatcggctgtttccatcgcgattaaacattttcaagatgctgtaccacccgttcgagattatgatccgcggattccacaagctttggaaaacgttgtgttaaaagcaactgccaaagatccggacgaacgctacagtgatgttgggcaaatgaccactgatttgagtacctcattatcagctagtcgggcgcatgaaccgaaattcgtgccctcacaaggtgatatgggtgaaacaaaggtgattccggctctcgacccagaagggattacgcgccaaaacgatgcgccagaagccaaacccaaagatgagactgaagtaaaagacgatcagaaaaagaaacagccgcataagaagtcgaagcggaaatggtggtttgtggggcttggcgtagtcttgttagtgatgctcggggtcttcgctgcgtacgcaatgcaaggcagtgaagtgactgttccagatgtgacagacatgacgcaagaaaacgcgactgcagcattaaccgcagataaattaaaagttggtaagattcaaaaaactactagcaataagtacagcaaagggcatgtgattttatcgacgcctggtaaaggaatgcatgttaaatcgggcagtacggttgatctaacaatcagtacgggtcgtaaaaagtatgagatcgaagactatacggacaaaccgttcacagatgtcagcacgttattgaaacaaaagggactgacggttgtgcgcaaatatcagagttcacgcagtgttgcttcgggactggttttagaccaaagcattgccgcaggtgaaaaagttgtcccaagtaagacgacgattaccttgactgtcagcagcggcaagccaagcattactttacgcaatttgagtaattacacgaaacaggctgttcaagactatgttgatgacgttggtttgacggttactttttcagaggattactccaatacgattgatgaagggttagtcattagccaatcacctggtagtggtgcatctattcaagaaggtgccaatattaacgtggtactttctaaaggtaaaaaagcgcccgctaccaagagttttacgaagtcgattacgattccgtttgataattccttagcaacttcacaaagtagtacaagcagctcgagcgaatcgggtgacagtagtagtacgagctctagttcaagtagtacttcaacggctacgacgaataagattacgatttatttagaagatagcacgcattcaataatgagtgtttataaagaaatgacgattaccgcggatacaaccgttgaattgccatttacgattaaagcggaccaagccggccgtttccggattttaagaaatggtcaagagattctatctgatgaccatgtgacaaactaattgggaggtgacctattgcagacaggacagattattcgcgccctcagtgggttttatgatgtacaaagtgaaggcaaaatttatcgaacgcgtgcgcgtggtaatttccgtaaacggaaaattacgccacttgtcggtgattttgtcgaattcgagagtgaaagtgaaacagaaagtggctatattcttgagattttagaccgtaaaaatgagatgattcgaccaccagtcgctaatattgataatgctgtcgtaattgtttcggcggtggaaccagcattctccttgaatttgttggatcgcttcttgatttatattgaatcgctgcacatgcaagggttagtttatttaaccaagaccgatatgattagtgatcaacaataccaagaaattagtgattacttggcgtattacgcgaagatcggctatcaaatttttgcaccgcggaccgcctttacaccggagataattacggcaattgaagacacgttcccgcataaaacaaccgtctttacaggacaaacgggggccggtaagtcaacgttgttaaaccacattgacccgagcttgaatattgcaactgccgaaatttcgcagagtttaaatcgtgggaaacatacaacccggcatattgaactgattccgttgaatgatgggttagttggtgatacgcctggcttttcatcacttggtttattaaacgtcacgattgaaaccttggttgaccgattcccagagttcagagaaatcgggcaaggatgcaagtttagaacgtgtcaacacgtgatggaaccgaaatgtgccgtgaaagaagctgtcgacagtggcgaaattatgcaaagtcgttatacgaattatttacagtttagagcagaattaaaggatattcggccagtttacaagaagtcaaaataaaaatgtgatcggagttttgatgatgaaacaaatcgcaccttcaattttaagcgcagactttatgaacttacaaagagacgtccaaaaccttgaaaaggcgggcgctgatctattacatgtggatatcatggatgggatgtttgtccccaacatgtcgtttggcccccaagtagtaactggcttgcggccattgacaacgttaggcttagatgtccatttaatggtcgaacaaccagaacgctacatcgaacaatttgcagcagctggttcagacttaatcatgattcatgccgaagcaacgcaacatctctaccgtggtcttcagatgattaaagatgctggtgttaaagcaggtgtggtgatcaatccagggacaccagtcagtgcgattgaaccagtcttatcattggttgatcaagtcttagtaatgacggttaatcccggttttggtgggcagaagtttattccagcgatgttggataaggtcactgaattagcgacttatcgcgatcaacatgctgatgcagattatacgattgaagtcgatggtggggttaacgaccaaaccgtcggtgcgtgtgccaaagcaggcgcagatgttttcgttgccggttcatatacgtttgccggtgatttagcaacccggattgcaactttaaagcaggctgctcatgacgcggattaatgtgttggtgggaggaccagtcagtgagtgggcccccgaattggcgcagccagaaatgattgatggtcaatgggtgacagcagaccgtggtacgtggcgcttattgcaaaaaggcgtaacacctgtcgtgtcagtcggcgattttgattcattgacggcggctgagcggaccaccgttcaatcagcagtaaaggatattcgctctgtgcaagcagaaaaagatgataccgacactcagttggcattatcaattgcgctaactgaatttaatgcggatcaagttgtgctttatggcgcaacaggcggtcggttggaccattttcttgctaatctctttatgcccttagaaacacgttttaagccgtttttagaccgcttagagatgcgcgatcggcaaaatacgattcggttctatgcaccagggacgtatcaattacaaaaagaagccgataaacggtatctggcctttgtgccattagttcccacaactggtttaaatttaattgatgaaaaatatcgcttggtggattaccaaacgcaagtcccgatttcatgggctagtaatgagttcatcggtgagaccggccaattcagttttgaaactggggtggttgcggtgattcaaagtaaggattaaaaagacggctcggataaaattattttatccgagccgtctttttggttgccataaacgtgttcgatcagtcatctcccgatgattagccgacttatctcgtactctttgccaaaaaaaatagaccgccaactggcggtctatcaattgaaattatacacgagttactttgcctgatttcaaagcacgggctgaaacccaaacacgtttaggtttgccatcaactaagatacgtactttttgtaaatttggcttccaagaacgacgagatgcgttcaaagcgtgtgaacgcttgttgccaaatgatgttttacggccggtaataacgtcttttgccatggtcttattcctcctttaagtaaagccggtagaattaacgagaaacataatatgattcagttagtcttaatagttgcatgcatgcacaccggcttatacaattcacttaaataatttaccataatagtttggggaatgcaagagctctttcaaggaaatttacttgacagtccaaaataagtcgtttaaactcattaaagtccaaaaataagccgcatttggggaagaattcatcaccagttgctttgcaactcttctccgctatgctaaaataacaataagtatggcacaaggaggctattttaatggctgttaaaattaaaacacaatatggcgatattgatattaccaataacgtgattgcaaccgtcgttggtggtgctgcaacagatatctacggaattgttgggatggcaagtaagaatcaaatccgtgacaatttaaacgatattttgaatcgtgagaattataatcggggtgtcgtagtccgtcaagaagacaatggcgttgcgattgatgtctatattattgttggttacggcattaagatctctgaagtttgccgtaacgtccagagtaaagtgaagtacaatcttgaaacaatgttgggtgtcagtgcgaactcagtgaatatttatgttcaaggtgtacgggtattagaagactaaaactaattagcggagctggccactaggtccagttctatttgtttttgttcaaggaggaacattcgtgaaagttactgaaatcacagcagcagaattccaagcaatgatgcgggttgctgcacatcggcttactaaaaatgcagaatttgtcaattcattaaacgtctttccagtgcctgatggggatactgggaccaatatgagtttaacgtttcaaagtggggccaaagcagttaatgaaaacaacgcgcaatctgtcggtgaattatctaagagtttagccaaggggcttttgatgggcgctcggggtaactccggggttatcagttcacaaattttccgtggtttttctaagagcatggctgaaaaagaaacgttggatgcacaagatttggctgacgcattcacaaatggtgttcaaacggcttataaagcagtaatgaaacccgttgaaggcacgattttgacggttgccagaaaaggcgccaaagctggtgccaaggttgccggtcaaactgatgatatcggtgcagttatcgaagctgttgttgagggttctaagaaggccttgttgaagacccctgaattactccctgtcttaaaagaagtcggcgttgtcgattctggtggtcaaggattggtcttcatctatgaaggtttcttagaaggtttaacaggccaagcacctgcaaaagatctttacacacctgatgaagcggaaatggatgaaatggtcaatgccaatcatcatcaaaccgctcaaatgggtacagaagatattgaaaatggttattgtactgaaatcatggtcgcccttggtgacgggacaactgtcgatcgcgaatttgattatgatgaattccgcaatcatttaaacggtgttggtgactctctcttagtggtagccgatgaagaagtggtgaaggtccatgtgcatacagaacatccagggacagtcatggcttacggccaacactttggttcattagtgaagattaaagtcgataacatgcgtttacaacatgatacgattgttgaaaacgaccaacaagctgctgcccctgtgcaagcagaacctgttgaaaatgggattatcgcgattgcggccggtgatgggattgctgaactcttcaagagtttaggggctacttatatcttaagtggtggtcaaaccatgaatccaagtacgcaagatattttagatgcgattaaagcagccaatgctaaacaagtgatcttattaccaaataataagaacatcttcttagccgctgaacaagctgccgaagtggctgatattccagttgcaatcgtgcaaagtcggacgattgctcaagggatgaccgctctcttatcatttgacccatctgctgaattggctgctaatcaagaagccatgacagaggcgttagataccgtgattagtggtcaagtaacgcaatcaatccgggacacgactttagatggacttgaaattaagaaagacgattacatggggattatcgatggtaagattaaggtctcaacggctgaacgtttaacagcagccattgaaatggtccaaacaatgcttgatgaagacagtgaaatcgtcacaattattatcggggaagacggcgatgcaacagaagctgaacaaatcagtgatgcaattatggcccaagacccagaattagaagttgaagtacacgaagggaatcaaccagtttacccatacttgatttcagttgaatagttaatcaaataaaacgggaatgaggttgaatatacctggttcccgttttttagtagaagtacgtttaaccttggaatatggttaaaaagcacgttaagaaaaagaagtgtatcaaaagtgcttatcctgtgaggattagtttaattagccgaatgactagcgtagctacttgtttggctaatggtgctaaacgcaacaggatgcttttgaaagcacgttacaggaggctgtcaatgttaagtttaacggattctgttgctgtgttagctggcgtcggcccgaaacgtctgacagccctcgatcagcttggcataaggaccattagtgatttattgtattattttccgtttcgttacgaagatttgaaggtcaaggatttatccgaagcggcagatcaggaaaaggtgacgttaaaaggaacggtcgtcgctgatccggtcatcagtcgttggggaccagggaagacccggctgaatgtacggctcttgattgaacatgacgttgtgatggttactttttttaatcaaccctatcttaaggacaaatttgaagccggggtcgatgtcgctatttatggcaagtgggatgctaaacgtcatacattgacggggatgaaggtcctagcggttcaatcggctgagaatccatcgtttgcggccatctattccgttaataaaagtgtgcgtcaagggacactggtcaagatgattcaagaagcctttgatttgtatcaggacgttattcccgaattgatcccagaggatattcgcacgcgctataagttaatgaacgaacgcgacttaattgctggcatgcatttccctaaaacgtatcctgaagcaaagcaagcacgccgaagcgctatttttcatgagttcttcctatatcagattcaattacaagccattaaacaggctgatcggcatgtggcaaacggtttagctttgcagtaccaaaatgaagcacttaaagattttattcaaaccttaccgtttgatttaaccgatgcacaaaagcgagtggtgaatgaaatttgtcttgatttaaaatcaccagcgcatatgaatcgccttctccaaggggatgttggttctgggaaaacgattgtggcggcgattgcgctgttcgcggcagtgactgcgggttatcaagccgcattgatggtgccaacggaaattctggcggaacaacactatcaaagcttgcaacgcttattggcaccaatgaacgtgactgttggcttattgaccggttcgacgacggctaaagaacggcggacgttgttggcagacattgaatccgggcgcatcaatattattattggcacccatgccttgattcaagatgcagtggtctatcataagttaggctttgctgtaattgatgaacaacatcgtttcggggtcaaccaacggcgaattttgcgtgaaaaggggttacagcctgatattcttgcaatgacggcgaccccgattccgcggacgctggcgattaccgcgtatggcgagatggacgtttcaacgattgatgaattgccaaaaggacggattccaattgaaaccagttgggtgcgtagtaatcaagtcgaacaagccctcagctttgtccgtaaacaacttgcaaacgattcgcaagtctttgcgattacaccgttgattgccgaatctgaacagatggatttaaagaatgccgaggagatttacgcaacgttggtggaacaatttgaacctgattaccatgttgcattgttgcatggccagttaaaagatgatgaaaaaaatcagattatgaacgctttttctgagaacaaaattcaattactggtttcaacaaccgtcgttgaagttggtgtcgatgtgccaaacgcgacggtgatgctcatttttgatgcggatcggttcgggttggcgcaattacatcaattacggggccgggttggccgaggtaagaaaaaggcatactgtattctggtggctgatccgaagaaccaacaaggtgttgaccggatgacgattatgactgaaaccactgatggattcgtcgttgcgcagaaggatttagaattgcgcggaccaggggaagtctttggtgatcgtcaatctggattgcccgtctttaaagttggcgatccagtagccgactttacgagtttacaagtcgcccaacaagaagtgcaaaaaatcttcacgcttgatcctgagttggcagcaccggaccatacgccactcaaaacatacttacaacaacaaaagcaaaattacctaacgttagattgaaaacggaaagaggaatgatgatgaaaattgcagtagacgcaatgggcggcgattttgcaccccaatcagtaattgaaggggtgttacaagcccgctcagaattaacagatgttgaatttacgttgtatggtgatgaagcacaaattaaaccgttgattgatgatatgacgcggttaacgattgtgcataccaccgaaaaaatcaccagcgaagatgaaccagtgcgtgcgattcggcgtaaaaagcaagcttcaatggttctggcggcgcaggcagttaaagatggggaagcagacgcactcttttcactagggaatactggtgcgctcttagcagccggattattcgtgattggtcggattaaagggattgatcgtccaggtttaatgcctaccctaccagccattaattcagatttaggcttcaatatgttagatgttggggccaacgccgaagcaaagccggagcatttgcatcaatatggcttaatggggaacttctacgcacaagacgtccgtggcattcaaaagccgcgaattggtttgttgaataatgggactgaagctggcaagggtgatgagttgcataaggcagcacatcaactactggcagatgatctaacgttaaacttcattggtaacgttgaagcaagtgaactcttaaaaggggttgcggatgtcgtggtcacagatgggtttaccggcaatgcgacgcttaaagcaattgaagggactgccacaatcgtgatgtcgcaagtcaaacatgcgattatggatgctggtgtcaaagaaaaaatcggtggtttactcttgaaaaagagtgttggtgggattcgtgataaattcgacacatctgtttatggcggggctgttttattaggcttaaaagcccctgttgttaaggcgcacggtgctgcagatggccgcacggtttactacactgttcgccagattcatgcaatgctggcgaaccaaacgattcaaaaagtaatcgattattttgaccaacaaaatagcccaaaagaaaccgattaaaataggtggacaatgtgttccaaaggcgctacaatatacttcgcaagtctgatttgatttacttgaattgagttgcgaagttatgtataatcactggatacccaaagtgttaagtacgtaggtaagggtttcaatttggaggtttttaattatgaatgaacaagaaatctttgataagattgcggctattattggcgatcgatttgagttaaataaggatcaggtaacagacgaattgaacttcaaggaagacttggatgctgattcaattgatattgtggaatttgttttggaattagaagacacttttggtgccgaaattccggatgaagaagctgaaaagatcggtacggtagctgatgccgttgcttacattaaaacaaaaatcaaataataaccttaaaaacgagcctgttggttgtgagtattcgcgaccgacaggcttatttttttgcatttgtataatttttcaagaattaaaacaaaactgggttgtaaaagtccgattgaatatcgaatttttacaacctagaaagctgcttaaagtttcgtccaatatttggggttcacttcaaacgctgttttttaatagccggctgacaagtctaccggattgacggataattcacctttgtctaaataactgggtaaattttgatcgaaaattttgaagagccgttcatggatatcagcgatgtaacctgaaatatgtggcgtgataatcaggtttggtgtggcccataatggtgaatcacttggtaatggttcgttttgggcaacatcgattgctgctcctgccaaatgaccggattgtagatagtgcatcaaagctgcttcgtcgactgaagcgccgcgccctaaattgaagaagtaagcccctcgatggagttgcgtaaaaaaggtggtgtcgaagaaccgattggtgaccggtgttaatggcatcacattaatcacgaagtctgcttgtggcaatgcttgttcgtaatccgtgtcggttagaatctgatcaaaattggcaacgggtttctcgtgccgattaacgccaattgtgtgcatacccatgacgtgggcatactttgcaatttcctcaccaatttgacctgttccaaaaatgaggagtgtgcggtgttccaaatttgtcatttgttcaccaatagcatgatgctcccattgatgcgctgcttgtgcgggtaagctctgataaatcccacgggtaaagtgtaatatgtaacttaatgccgtctgtgcgattggttttgcgtgcatcccgcgtgcgtttgataccagtaccccttgcttagctaacgtggctagtggtaaataatcaacccctgagcttgcggtctgaatccattttaattgattaccgggctctgctaaaattttcgggcctacatctttattccaaccaaacataatctcaatactacccagttgacttggttttaaatcagctaaagcgatgattgttaaaccttgtgcagttagtgctttgacgtgttgttcaggaattgtttctgctgataaaatgactgtcaagtcgatccctcaccttattattgaagtaatctttattataagggattttcagtaaataaaaaagcattaccgactgaaaacggcaatgctttataaaaaattttattctttttctgcacgtggccatactggacgaccccagtattggaataaatcagtttgaatccgaccattatacaatttccggcgtttagttgcgcgttgcccgaatgattcttggaattgtaagtcacttgttaaaatatacttactccaagtcttcaatgaccgataggtatcacccatttctttatacaaagcacgggcttgtgtttggtcacttaatcgtttcccgtaaggagggttggcgatgatgaccccgttggttaaatctgtcttgaaatccttaacagcgagttgtttgaactggatatcatgtaaaacaccagcttcgttcgcattcaacttagcgatatcaatcatgttttgatcgatatcataaccaaaaatttcaagtggttggtctttttcggctgctttcgcttcggctttggcattttctaaaacagaagcatcgatccaatcgaagtcttcaaaggcaaacttacgatgcataccgggtgcaatgttgtgcccaattaaagctgcttcgatcgcaatggtcccagaaccagtcgttggatcaacaaatggcatatcaggttgccaacggcttaaaagaattaaggatgccgcgaagttttccttcaatggggcttcccctttttcaaggcggtagccccgcttgaataaactaggaccagttgtatctaagctgatcgtcacgacatcttttaggatgctgacttcaagcggatacgttgcgcctgtttcagctaaacgtgttcggcggtgatagacagtacttaacttatcaacaatcgcttttttagtgatggcttgcacgtctggttcgctatggagcgttgaacggactgagcgaccagcaactggaaaagcggcgtctaatggcaggaacttgtcccatggcaaagctttcacttgttcaaaaaggtcatcgaaggttttggcctcaaattgaccaatcgcgattttcacccgatcagcactgcgtaaccagagattggtttttgcaatatctgccacatcgccttcgaaatacacccggccattatctgaacgtgtttcataaccgagattttgtaattctttggccgtaatggattcaatcccactcgccattgttgcgtatagttggtaagtcatgtttttaaagatccccttaggaaattattttttaaataaaaagagcttgggcaaaagcccaagccacctgattgtaaacctttataggccatgttttgttccagaacttccccaggaagaaagttccttcagtaatcatctatctgttcttacgaactctcatttttagttcatttccataaatgagacgcccctaccaaagtttgggttactcgctcgcggggtttacctcgttccaccgtccaagtttccaaggacgctccgtcactgtggcactatttaaggatattcacgcatgaccgaagttttagcgctttttccgccgttaccgttaaggtaccctggcttattgggccaggcacgaacactacaagcatctcagcctgtgcgggcatggaccttcctcagcctaccgatgtagaccgcgattactcaagatttacaaatattgaatcaatgtttataagtatagcacaagattaaagatttgtctcgtcaaattgtgaatgattttgaactcttgtctgtggagcttgattttgttcacttaacttagcaccgaacacgtggcgttcaaggtttgataagcgtttcaaaatatcatagttggttgctgctgaagcttgttgtggtgcactttccttcacgttatcagaagcgctgagttggcggtttaattcgtcaaccttcttgaataagcgggcattttccgccgttagccgatcgattgcttcttgataagtttgatagtctttaataactaaatcaaggtaaccatcgacttcttcaggttcatagccccgcatttttgttttaaattcttttttcaatatatcagttgggttcaattcgatttcaatttgattgtccattttgacacctcatttagaataaatgtactatgattcccattatagcaaagttatcggataattaaaactcttgctgatctaattccgctaactcagtcgcgatatcttgtagttcgaaaaaatcgaccaagttaatcggataatcttgttggtcttgatattggcgggctgcatgataatcatattctggtttgcccggtgattcacgatcatagtataatagttgaccatccgtatgggtcagcatgaattgttgatactggcgcaattgttgcggtccagaatacggtgcgttaaccactggttcgcaaaaatcgactcgcgctttgagctgactcaattgagcttggttattttcgttccattgttgaccaaaatcattaaacggcaacatcatcgccaattttaaatccggatagtccgtttttagttcaatagcaacttgcagactccactgttcaatccccatttggccaccagtgatcacccactcgagcccatcatctaaatattgtgttaactgcttttttaatgaatatttaattactttaagtttctcgtcagtttcgccaaaaacaccgagttcatagcttcgatagccgctcacccatagtcgtttcaagtcaggtccctcccaaatgattttcaattaaactaaacattgctataatagtgaaacaggagtgtgattttcaatggcctttcattatcctaacggacagccttatacaaataatgagacaaaaccaactaaaaagcaagcccggcaaccagaagcaacaacgttatttggtaaacgcggcatgacgttggaagaagaactcaatgatagtaatcagtattatcgattacatgcaacggctgtcgtgtataagaaaccaacgccaattcagattgtgaaggtcgactaccctgcccgcagccaagcggttattaaagaagcttattttaaacaagcctcaacaactgactataatgggatttatcagggccgttacgtcgattttgaagcgaaggaaacgaagaataaaaccgcgtttccgtttcggaacttccatcaacatcagattgaacatttcagagcctgcttgaatcaaggtggcatctgctttgtcattatgaaatttgtcccgctacaacggctattcttgtatcccgcaacagaactgattagccgctgggacgcgcaagttgatggtgcacgaaaatcgatttcactcagtgatgtgattgacaatgggattgagattaagtaccaacttaatccaattattccctacttagatgccgtagatcagttattaaagcggtcaaataaaggagtttaaagaacaatgtccgataatcgaaacaataataattcgcgagttgcaaggcacaaagctgaagcaaaacccgctaataagaaacgccggcccctctttttaagaattctaaaatggctgttactactgattgtagtggctttcgtggctgggattggtttgtttgcctactatgttaaagatacaccaaacctaacgcaagcggacctgcaaagtccgaatgcgacaattctatacgatgatcaagggaaacctttcaaaacaattggtggcgaaaatcggagttatgtcaagagtgatcaaatcccgcaaacattaaaagatgcagtagtctctattgaagatcgtcgtttctataaagaaaaattcgggattgatccaatccgaattgcgtctgctgcagtcgccaatattactggtaaatcaccgctgggcttacaaggtgggagtactttaacccaacaattgattaaactgtctaaattctcaacgaaaaacagcgatcagactttcagacgaaaagcacaagaagcgtggcttgccgttcaagtcgaacgtcaatattcaaaagaccaaatcttagagtattatatgaacaaagtgtacctgaataacggggtcaatggtatggggacggctgctaagtattattatggcaagtcgttgaaggaattaagtttgccacaactggcattgattgcgggtatgccgcaatcgccaagtaattacgatccgtacctccaccctgatttagcgaagaagcgccgtgatttagttcttgatgcgcttttgcggaacaataagattacagcaactgaagctgccgaagctaaacaagtcccaattaataccggcttagtggatcaacaaacagtagcgaatagttcaacggattctaaagcaaccgacgcttacgtcaaggaagtcctcgccgacttgaagaaaaaaggctatgatccgtacacggctggtttgaaagtctacaccaatatcaatatggacgcgcaacgtaagttatacgatatcgtcaataatgatagcagtattccattcccagatgatcaactacaaacagcagtttcaattacagatcctaataacggtcgaattgttgcgatgattggtggtcgtaaaactggtgatgtgcagctcggttataaccgggccgtgcaatctggccgaagtaatgggtcatcaatgaaaccattaatggattacggtccagctatcgaatatcttgactactcaaccgcacagaaactacaagatgtcccttacacttatcctggaaccaatattcaattgcataactttgatggccgttatctcggtacaattaccgcgcgtaatgcgcttgccaactcacgaaacgtcccagccatcgaactgttagaagctgttggcatgactaaagcccgtgaattcgtgaaaggcttaggcattaacgtgccagctgatactggtctttcttatgggattggtgggaatgtttcaactgttgatgaagctgccgcatatggcgccttcgcaaacggtggaacttactatgcaccaacttatatccataaagtcgaaacagccgatgggattacgcataattatgattctgatggcacacaggctatgaagagttcaacggcctacatgattactgatatgttaaaagatgttattaaaaatggttctgggacgttagcccaaattccagggcttcatcaagctggtaagactgggacaaccgattattctagcgaagaaattgccaaatctgggttaaacccaactttagcgaaggatagctggtttgccggttataccaagaactattcagtgacggtttggactggatacgatgaaccacttaaaaatggattaacaatgagtgagcggaacgtcgccgcttatatctataaagcaatgatggcctacctcgctcaaaacgcaaccaactcagattggtcaatgccaagtaacgtggttgctaaaaacgtggctggcgtacgagaactctatattaaagggacgacgaccattccaagttcttcaagcagtcgatcttcttcaagtagtgtactctactctagctcagaagcaccggtcagctcaagcagtgaaatttctagctcaagtagcgtggttgaaacaccaagtgaatcttccagtgtgccggagacctcatcttcaagcaccccaactgaaagttcacaatcgcaaccttcgacctcaacccctccggcaacaactaatccaggaacggggtcgacgacacaaacaccagcagcgccaactaactaaaagaagcaccgttcagttcaacgataaacgttggctgaacggtgctttttttgcgttttttaaccacgatcttcaagaaattgttggcctgcttggcaaatccttaataagggacactcatcgcaatgcggcttacgtgccgtacagacttgccgcccaaaaagaatgagtgtgtggtgcgcttgaacccatgttttcttaggaagcttcgcttgaaagtccttttcaatctggatcaccgaggcatcctgtgcactgattttgagccgtttggcaatccgagtgacatgcgtatcgacggcaaatgatgggacgttaaaggcgtcacctaaaacgacattcgcggtcttacggccaacaccagcaagttgttccaattcggcatgtgtgcgcggcacttccccaccaaaatctgccattagttgctggcagcatgttttaatgtgtttagctttattatgatataacccgattgaatgaatatcagcctcaatatcggcaatctctgcattcgcgaaactagctggtgtcgggaaatcagcaaatagttgtggggtgaccttattgacggaaacgtcggtggcttgtgcgctaagcatcaccgcaatcaacaattgaaacggtgaatcagcaactaatgcgccctgcgcatctggaattaaattgtatagttggtgcatggcccactgtgttttggcttttgataacatccgcttcatctcctattcgattaacgtcttggatgggccttttggtaagcttgtagggattctttatcagtaatattttgtttctgccagttgagcaaaatcttatcaacgtacttcaaggaatagacttgatttaaaacggattctcgcacggctaattgaatcaattctggttgataatgatctaaatctaaccagttggcaacaatctcagattccaatggcgataatgggcggccaagagcttgttcaacttggttaaagaccgcactccgttggttaccgtctagtgcttgttgagtgacttgtgcgtcttgaacggctagcacgctcaatttagttaaggctggtgtgagatcgtaatggtcttcagccttaccttgttcattgacagatgatttaagggtaattagttttttctgtaaaagttgatgaatcaatgcgtaaatttggctggattcaattcccatgcgttcaccaatcacagctaaatcgggaaagtcattgttttgactggcaaaatcactgagctgtaagtaaaccactaattcttcagaagacatcttgagcgtttgatagtgatgcagtaacagtcgagagacactcaattggccgccttgtaaaaacgcggtaagttcgttcatattctagccttcttttctaaaagtttcattagttctattgtaaccaattttagacaaataaaaaagcgccgagaacctgatttcggttcacggcgctttagttaatcctcaaagccaactcgtttgagtcagcactctgatttgaaacatgcttttgaaagtagtcctcggtgctttgctacgtccagcaaacgatcgacttgcgtcgctcattcactagactagacaaatgctcgagaactaaccactttcaacgcactctaattcaaacgtgcttttgtagctaggttcctgcgcttaacaatgattgtcaaataatcgattgcatcgattattcgccaaccaacgttaatgctcagaacctaaccagctacaacgcactctatttgaaacgtgcttcttcgaactgccttttccggttaactgtaaaacgggcaccatggctgtgaagcgccataatgcccgttttgctgttaatcctcaaagtcaactcgttcgagtcagcactctttatggtttgattctgttaatcattcttgggaatggaattgtttcacgtaaatgatcgataccacagatccatgtaatggcccgttctagacctaatccgaaaccagaatgtggcactgatccgtaacgacgtaagtctaagtaccattgatattcttcaaggtctaagcccattgctttaatttcagcttctaatttatcaaagtcagtttcacgttcactaccaccgataatttcaccataaccttctggtgccaataaatcagcacataagtaaacatcatcacgtgttggatgtggcttcatatagaaaggtttgatggcttttggataattcaaaatgaagactggttgttcaaattgatccgataaataagtttcatctggtgcgccaaaatcatcgccccatttaatatcgaagtcagctgcttgtaacatttcaacagccttatcgtatgaaatacgtggatacggtgttttagtatatttcttcaattggtcaacatcacggtccaataattttaattcataggcacagtgatcaatgacgttttgaacaaggtaagccacgtatttttcttggacttcaagactttcatcttgagttgtgaaggccatttctggttcaatcatccagaactcagtcaaatgacgacgagttttggatttttcagcacggaaaacaggaccaaaagtgaagactttgccaaaggccattgcgccagcttcagcgtataactgaccactttgtgttaaataagcatcgttgtcgaaatattcgatgtggaataattcagttgtcccttcaggggcactacccgtcaagattggtggatccatcttgatgaagccttcttggttaaagaattcataagaagcgcggatgatttcatttctgattttcatgatcgcaaatgggcgttttgaacgtaaccataagtgacggtgatctaataagaattcaatcccatgttctttaggtgtaattggatattcgctgctgtcaccaattaattcgatgtcagaaatttcaatttcataaccaaagtgtgaacgagtatcttcatgaatgacccctgtcacccacatacttgattcttgtttgacatcttttgccaattggaaaacggcttcgcttacttggcttttaacgacaaccccttggaaaaaggcagtgccatcacgtaattggaggaatgaaatcttcccacttgaacgtttgtcggttaaccaaacgccaattttaacttcttcatcgacatggttttttgcatcgataatactgatttttttaaccataaactctgtctccttatgtgcaacatttaatttacaacagttcaaaataactgatagttattattatataacaaaaccctgacaaccacagccccctaattgagaaccctagatattttcaatcaattgaatcgtcttcccggttttaaaatcgagggttaaataacaaagacggcctttgtcacttttatagacaacttcccaaacaggcttgttgcggtacataccgaagttaatgttcagtactttttgcggatttttaattgaccatgtcttttctaacgcatcgtttttagaaataccaccactttgacgatagacagtggcatgattgcctttttcgttgattaaaacgaagatgccgtgattatcacggtctttaccactaacggtataatatgttgcatttcgatgatacgtgtagaacccatcaggctcttttaatttcgcgtattttttagcaatgttaacggctttggtttcagccgttgcttcgggttttcgagcttgatgataaatcatcagcatgctgccaatgattaccaacaataagaatatccagagccatctcttatatttgcgcacgctgcattctctccttgttcgcttgaataagccttattatagcaaaaaataacggctatcggcgcttaaaaccgaatcttagtgggaatttaaccaaaacaagtcggttaattcccggattattttaaccgacgctgctttttggggcaaacttgtcggtaacgcgcggcgcatttgttgcccatattgggtcgataataaccggggatctaaacaaatgaagacgccgcgatcgttaggggttctgattaagcgcccaaatgcttggcgtagtttaatcgttgcttttggtaaagcctctgctttaaatggattaattccttgggcagaaagttgagcgtaacgaattcgtgtctgcagtgcattcggcgcatcaaatggtaattgaacaagcaccactaattccagtgctgattccggaaaatcaacaccagcaatgaaactgcttgtcgccaacaagattgaatcgtgccccagcataaagcgcttggtaattttctccgcactacccgtaatcccttgggcaagaatctcacgatcaagcgataaaccggcgcggccaagcgcataatacacttgttctaacgcctgattagaattaaagaggactaacgcctgatgcggattgccaactaataacgttaatagctgttcagcaactgcatgatggtactcattgggggctaaattcttttgactaggaccatcttcagcgataaaaaagcgcgcctgtttcttgaagcggaatggactgcgtaatttcttagtcgctagtggttgcgcttcggtaaaaccaagttcacgtttcaaataatcgaagtgcccattaaccgcaagggttgcgccagtcaaggtgactggttcaaagtgcgcgaggatctgttgcatttgcggaccagctgaaagcaattgccactggagcttaaactgtggtaactgactaggttgtttaggctgtgtcatctgaatcattaacgcgtgttgttcctgcggtttcgtcgcaatgaataattgctcaaaccgttgataggcttcaacatccgccaacaataggttgatttcgttttcaaatgactgccaaatccccaaatccccctctgtatattgttctaaccgctgttcaagccagtaacgcaacgcgagaaaatgatcttgaatggtcaacagttggcggttcagttggtcgaattgattatgacaagcggtgacaaattgaaccacttcatctggattcaaataacgttcactaaacgcttgatgcgcttctggttgcggtagttcaaacgctgtggttaggtatgtctctaagtcactgatggttcggcctaacttggttaagtttttatgcactaaccgtaacgagcgggcttgcggtgattttttcgggaaaagccgggctaaattattattggcctgttccggatccgtatattgcaaccctttttgagaccaaagttgccaacgtgaaagtgaccaatcttgttgcgcaattttttgaacattgaaaatcatattttgtgcttcatctaagaccaagtatggtcgcgcaccccaggtttggtgatcattcgcgtgctctgccaggtaggcgtggttggtgacgagtaattcggcttgttgctggcgcttatgcaggcgacgtaagaaatcatcttgataaaacggcgcttgtggttgcagacttgttaatccccggtgttgcacgttattgaaaaatggtgtttggtaactcgttaaattgagttcatccaaatcccccgttgttgtttgggttagccaaactaagattttcatctgaagcaaccgcaccatccgattcttatgtggtaaacggagcgataattcaaagcgatgcaaatccaaatagtgacgcgggctcttaacgatttcggcattaatttggcgacctactaatttttcaagaagcggtctggcctgcgttaaaatctgatcctgtagcagcgttgtcgatgttgcaaccactaatttgtgttcaggcgtcatgcgataactataggggagtaaatacccgatggtcttccctaacccggtggctgcttcaattaatagtggttcaggtgcctcagattcgaaattatcgtgaatcatatccatcatggcagcttgcgctttacgccatttcaagtggggttttaataatcgttttttatcagcttcttccactggataatcagccgcaaaattagatcccggatagatttcaaatgattcctcggctggttttcgtagggcaatgttttcacgaattaagagatcgttcggcagcggtctcgattgcgcatgcatctgctcggcaatcgctgtgaagaaatcccctgtttgacgtaacaagcccgcgcctaacgcactaagacgttctagggtaactaatggcagggtcttcagccgtgccattaattttaagaataatttagccgttaccaaggcatcgctgtcagcttgatgaggattgtcatgttcgatggcgagtaactgtgtgaggtcttgtaatcgatagctcggtgcttccggcaatacgatctgagccagttcaacagtatcgatgcccggcaaatcaagtggcggttgccccacgcgttctaattcgccatttaaaaaaggtaagtcaaagttaatattatgggccacgaaaacagtaccggataagagttcaactaacgttggcgctaaatcttcgaaaatcggtgctaattcgagttgatcagcagtgatatgcgtcaaatgttgaattttagtcggtacgtcgcgaagcggattaacatcttgcgaaatcgtctgaatgattttgccattttgaatgagggcgcatccgaattgaataatgcggtccccttctttaatgtttgtgccagtcgtttctaaatcaacgacggcgtaaattgtctcttggttcatgctgtcaccaatactttactcattattatatcaatcatactatgaatgacgcgtagaaaccagtctagttaatagcgactagttggccaatcgacaatagatagagatatttagcggttaccggccggttagcaatttgcgtcaacgcggcactgtataggttaatttggccggcataccgcgctttaatcgcctcaatggcagcttctggatcagctgggttcacaaaatcagtcttatagtcgaacaaaatacagtcggtatccgtggttacataaccatccataatcccatggattaagacattgtcttgatcttctgggcgtaaaccggcgaataaggatgcagccggtaacaatagtgaaaatgggacttcccgatgaacttgcgctggttcagctaacagttgctgacccaactcgctctcgaagaatgtcatgatagcagcaactttaatttgttgtgcaacattggcagtgaggcttttttgtaaaacaagtcggtcgatgacactttgcacccgatcgatcgttactggttgggttaaatcgatttcttgtaagaccagatgcgtcgccgttccaatttcagccggactcgcttttcgaacagtctgcatgaattgtggttgaggtaattcatcggtcacgtaacgatgggtttgttgcggtgtatcagcgtcaaagcgtaattgccccaactgatcattgtcgggatcttcaaagagccgtttcacttctgaaacagactggtaagctgtcgttttggtggcgccttttgctggataactgaatgttagctggtcttgaatcccgttggctaaatcagttgttaaatcgaccgccttgagtgccacttgttgttgctggctccaatcttgatcatggtgtaaagcacctggtaattcgccaaggcgcgtttcacttgtaaacgttaaattaaattcagttgcgtcatcgctcagaggtaggaatggtgtcccctcttcggtccaatcacgggcttgcggatgacgaattaagctcaatccaatccaatctagtaagttcgtgctagcttgacgaacagaagcgtccaaccgcagatcaggattttgctgtcctttttgccaagttgcaaatagtttcgcttggttatcacaactgcccgcgataatcagccgttgctcggcacgcgttaaagcaacatagagttttcgcatttcttcagcgcgtaacttttgccgtttttgggtcgtgatggttaattctggtagtgttggaatctttaaccgttttttcgcgtctaagtaaacaattccgagtcccgattgatcatcgagcacgtaattttggcgcaagtcttgctcgttaaattgatgattggcatccattagaaagaccaccgggaattctaagcctttactcccatgaatcgtcatcacagagatggcatcttgattggcgagactggttggttgggctaaatccttatcttgtttttgcaaacgttcgataaattggatgaactggaagagccctttaaagccgtttgcttcgtaagtcgcagcgcgttcatagagtgcgtgcaagtttgcttggcgttggcgacctgctggcatcccaccggcgtaatctaaaaagccggtcttttggtaaattgtccagattaaatcaacgagtggccgttgacgtgcaatggctcgtaactcatttaataaggtttggaaatgcgttaatttttcgaagacttgttggccgagttggccggatttttgtgcttcgaactgatcaagataattaaaaacggcttggtaatagtcatccgttttatcattaatccggattaatgcgagttcattttcgttcataccgacaattggtgaccgaagcacgctaaccagtggaatatcttgattgggattatcaataattttcaagaaagatagcatgatttgaatttccgttgtttggaaataattctgcgcatcactaatgacaatcggtaagccgaaccgttggaaataatcaagaatgattaggttgttgttgcgcgttggcgtcaataagacaatatcttgatagcgaattggccggatttcttgcgtatcccgatcccagatggtttcttgattatcaatcattcgtttaattcgctgtgcaactgatgcaatctgaccttcagctttatcaagcttgcccgttgattcttcatcagtcggttttgtttcgtataaaagtaattcagttggctgagttggttgatcgtcaggataataagtcgcaccatattgcaattcagcgttgtgatcgtaatctagctgccctaattggcggtccatgatttgtttaaagactaagttgacgaaatcatcgatattacgccgtgaacggaagttttctgcgagaataatgcgttcactatcgttatctggcttggcgaattcgtcgtacttaccgaggaacaaactcggatcagctaatcgaaaggcatagatggattgtttaacatcccccaccatgaagacgttgcggggtgcttgactagcgatagtttgaatgattgtttcttgtaactggtttgtatcttgatattcatcaaccaggatttcactgaatttattttgatagaacgttcgtgctgcctctgattccggagtgtcaccggccaaaatatccaaacagaaatgttctaaatcgccaaaatctagtaaatagcggcgtttcttctcagcttggaaggcttgcttaaaatcgcgggtaaccgtcactaacttaccgactaactcaccagcgcgccgttgaatctgactggtttgtgcttcgtcaaagacaaaataggttgttaaaagatcgtttagtgcccctttgacattatcgagggcgtttttgatccggtccttgtcatattgttcatcgggttctaatttcttagttcgtttggcgggtcccaattgggcgtcggtcaattgtgtgcgccactgcgcccaacttaaagtggccgcgttggcttgaatggcagttagtgctgcttgtgccgttgcgatagttggcaagtataccgcaaatttctcgtttgtttgacttagttcgttggcgagtgccaagtcttttaaacaggttgccaaggtcgcttctaactttggcagaatcgttgttttgaaataagcactggttgttaggccagtctctggtacctcgtaaggggcggttagagattgtaaccattcatcgggcgctggattggcaccagagaagttaaacagttcgaaaacaatgttggttagcccatcatcgttgcgatcgttcgaaaaattttgcgctaaatcataaaataaggcgtcgtttgactggtaatgttcttcgcgaacgcgttgccaaacttgatcctctaataagagacgttccgcagtatcacttaataaccgaaacgcgggatctaacttaatcacgtagtagaaatgtttaatgacttgtaagcaaaacgcatgcaacgtgctgatttgtgcggtcgggactaggctgagttgctgccgtaagcgttgttgcaccgctttgtcggttgcctcgcttgctttttttcgcagtgccgtttgaatccgttggcgcatttcagatgcggcggcttcggtaaacgtcaccaccaatagtgaatccacatcagtgccattcaagattttttgaatcacgcgttcaactaaaacggttgtcttcccggagcccgccgaggcagaaacgaggatatcatgccccgcgtgatcaacggctgcttgttgggttggtgtaaatcggcgatcactcatgtcgttcttcctccgagttcataattttggctaagacggcttgattatcaagcgcacttaattggcgataattattttctggtaacatcgcatcgaattggaaaatcgatttatatggcgacattgtgagtgcattcgtgcggtcgggccgcataatcggattcaaagcattttcgccagcaaaaatcgcttcccccgctgctttgattagttgatcgttatgggcaattaattgctgtaactcatcaagggtgaccagttgtttcgatttgaatgccccactctttggacgattgaagttaaacagtggtgaatagccactttctaaagctgtatccaagttttcgagtaaggtctcatcgtttaaaattaagccatcatacttaaattgatccagtaataattgatcgagttcgcctttttgtagttgagcgagtttttgtttgttcagttgcttcaatgacattgttgggttttgaaggtgcagataaaaggccccggcaggttttaccttgctttgcgctggtaaaattgctgcttgatcttgcaagacagtttcaaggtatgtcaacatttgcaatgccaaaccatagtatgcatcgcggaagctaaagctgtgttgactggatttgtaatcaacaattcccaggtaggcttggtcgtttaatgtcagttgatcgatccggtcaattttcccccgcaccttaacccgacgttgattgggtaattcgaattctagaccagctaatccttgttgggcaccaacttggccgaataagacttcggttgccaacggttttaagttcgttcgttgactctgatcgcgcaatgtccggctgacgcgtttaattgtttgactcaattgttggcgaatgtagcccattcgtgctgatttattgaggatcttaaattctggttgttcatacgctttttgtaagatttcatccgtcaatgcatcgatttgttgattatcgagatcgggtaagactaagcgttgggcttgaatcatcttgataaattgatctaagacttggtggtagaaatcaccggtatttgcaggtgtcagttcaaaaattgggcgctcgttcagttttaagccgtattttaagaaataagcgtattgattttgatagaactcttctaatttcgagatcgacgtatggatttcattgccatataacccagtgacaatatcgcttgtcagtgcaacgggttggttatggtacgccagactttgaaggagttgattggttaagtagtgactaacaggaaattgttgtaataaacgataaacagtctgccattggtcaggaattagtgtttgcgtcgcttgtgcttgtcgcgcaacttgaatcaaatcgcttaacaaactacgccaagaacccgtaattggcgctgtacttgtcggaatgacttctgctagaacgcgttgctcggttaaatggaagtagtttttaatccggtcgacatagggggataccgtgtagttcgccccttccccattattcaatggataagtgaaatacaatccttcagtaccacttaaaaaggccaagtagttcagataaggttcaaagctcatctgactggcacttggatcagttaagaattgttctgaattgaaccgatcggttaatagttgccgatcatggtcggataataaggcgctggtttcaatctgatcaggcatcacttgatcggtcgcaccaatcataaaggtaattttgcggcgtttagtctgcaccatccctgattcagataaaacgacctggtcgagtgtcgatggaatttgcgcatattgcgccgtattaaacccggccgctagtaaatcccaaaagccctttagttcgaaaggttggtcgcctaataacgtcacatattcatccaacatcgtcataaatgtttgccatgtctgttccggttggccagctaaggcaatttgattggctgcgagtgcttggtcccgccaatttaacaattgtcgatcgacaccttgttcgattaagaattgatagagcactttagcggcatcgcgccctgttttggcactgtctaaccgtttataaaatggtggtaatacggattgaacataatgccgaatccgattgatccgttccgtgagcacttcatcttctgttgttcgaacaccatcttggaaggaaccgaaccgataatattgccaatcggctgcgcttaaccaatcatgcccttcatacccactttttaaaatcagattttcacacaaatcaagatcagcccggaattcagcgactgattgatagtcatctggtattaaaagctccgtcttcaaaagcgccattacatcttcatagcggtagtaatgctctttcacatcaaacaacgctgccaacatcgcaacaagtggatgggccgccattgtttccggtaaatcgcagaagtacggcacttcgtattctgtaaaaatcggcgcaatcattgtttcataaggggctaaatgccgagtcataatcaagaagtctcggtagcgatagtggccggtttggactaaacgacgaatttcacgggcaacataccgtaattcggtataccgattttcggcaccgatcacttgaagttgcgtcgaatcgatttccggtgctgttgggatctgaccgtggttttcagaagcaacccagtaccgatcaagcgcgagtaacgttggtgaaacccgctggttagtggcaatctgatcagtcatgatgggaatgtgattttgcttggcctgttggtataattgataatacgtacgctcagcttgataaaagaagctgagtttttccggtggttgttggtaattaacatagtcggtaattaaggctacggttaagcttgcttgctgcattaagacggcgactagcgcttgttcttgagccgtgaattgtgcgaaaccttcgatatagaaatgacaatcgtgtaagtcttgtttttttaaataatcagttaaggcatcaattaacgtcgtattttcgatgaattgcttttgcatagcggcttcaaacgccgtggcaataatggttatttcccgcaatttagtagtcagttcgacttcttcgggcgctagctgggccgcaatctcagttagctcatcgggtgtaatacagcccactttaagttccaatagttggctcgttaattgagcaacaaagcctgtttgattgacttccccaccaaataagctgagttcttctgcatgttcttgcaagaggcggtagacaaggatgtttaacccggcggttgaaatccgcggaatctggtagtacggggtatttttcatgaaataccaagctaatcgacttaatgagaagacttggacgcgtgaggttgcgacatactcacttccaggggtttttaggtcatttaaaagtgcgacttcagattcaaatttgatatgattcgggaccaaataaaaaaagcggtccgtgttggtggccttaaggtctgtttgtagttgcttgactagtgtttgatggtggtcataactagctgtaccaataataaattttaagctcatggcgcccacactcctttggcgtcattttaccatagatagacaagtgattgggataaaatccggctagtccgttggtaaaaagcgggtataataggaaacccattaacctgtgcccaatttgatttatgtggcggtcatttttgttttgcagtatagtagtaagggtatcttcaagtcagaaaaagagattaagggtgattgtatgcagactggtgttggccaaagtcatgcgaaaattattttaattggggaacacgctgtcgtttatggacaacctgcgattgccctccccatctttgcggttcaagcgcgggtaacggtaactctcgagccggcactccagacaccgcaaattaagagtacttattacaatggtcctctagaacaggctgttggtcagatgcaaggcattcgccggttaattgaacaactgtggcatgcattagatccgaacttaaccccgtttgaattgacgattgaaagtgacttaccgcccgaacgcgggatgggttcttcagccgcaacggccgtcgccatcattcgagcgttatttgcgacttatcatcaagagctcagtcaacaacggctgctaaagctagccgcgctctccgaaaatttaatccacggtaatccaagcgggattgacgccgcaacaaccggcgcaactacaccattatggtttgtcaaagggcagccgcttcaacccctacccattaatttaaaagggtatctcgtaatcgccgacagcggtcaaaaggggcaaacaggtgccgccgtcaaaagcgttcagaatcaaatgatgtccaatccagaacaaacgcaacccttaattgaccatttgggttatctaacgcaacaagtcgcaagaaatattgcccaaaacgaattaacggtacttggcgcgaacctcaaccgtgctcaacttgatttgcgggcactcggtgtcagcaatgcccgtgttgatcatttgattgatgtggctaatcagaccggtagtttgggcactaagttaacgggtggtggccgtggtggctgcattatcgccctggccgctacgcaaagtgctgcggatgatttggcacaagccttatcagcagctggtgccatcaaaacttggattcaaccactacacgcactttaaaaaagattaggagtattactatgggacaatcaattacagccagagcacatacgaatattgcgctcattaagtattggggaaaacaaaatccggaattgattattccgtataacagtagtctttcaatgacgctagatcatttttatacagatacaacggtccgcttttcaactgatttgactgctgaccaaattagctttaatggtgccattgcggataccaaaactagtacgcagatgagtcagtttctcgatttaattcgaaaacaggcgcatctgcctttatttgctgctgtggaaaccattaatcatgtccccaatgctgctgggttggcctcttctgcttccggttatgcggcattagctgctgcaggtagtcgtgcagctgggcttgaacttaacgatcgggatctttcgagattagcccgccgtggttctggctctgcaacccgctcgatttatggtggttttgtggaatggcaacgtgggaccaatgatttggattcatacgctgttcccgttcaagaaacagttgattgggacatccagatgattgcgattgtcttaaatgatcgtcaaaaagccatcgccagtcgtgctgggatggcgaatacggtggccacgtcgccctactacccagcatgggttgaaaccgctcaagccgcaattccggcaatgaaggccgcaatcgttaagaaagatataaatttggtggggcaattagcagaacaaagtgcgatgcagatgcatgcgacaacccttagtgccgtcccacctttcacctattttgaacctgaaaccctacaagcaattaaagtcgtgcagaccttgcgccaacagggtgtttcttgctattatactatggatgctggtccaaacgtgaaagtgatttgtaccagtcaggaaacacctcagattttagcggcgcttgcgccctattttagtcctgaacaactccttgttgctaaaccaggtcctggtgtgagctatcgataatgcaaatttaagttaaacgtgaaaggttctgatggtttgataacggctaaagcgcccggaaagctgtatattgctggcgaatacgcagtagtagaaacaggttttccggctattatcgtggctttaaatcaatttgtgacagtcacaattgaagagagtcatgaatatgggagtattgtgtctaaacaataccaagaaaattccctttattggcaacgacaaggtgatgaaatggtttttgataaccgcgataatcccttccattatattttgtccgcgattcgcttaacggaacaatacgcacgtcaagcgggtaagacattgcgcgtctaccacctacgggtaaatagtgatttagactctgctgatggtaaaaaatacggtttaggcagttcagccgccgtaaccgttgcaacggtaaaagctctctgcgccttttatgaattatcactatcaaacgaccaattgtataaacttgctgctattgcgcatttagatgtgcagggcaacggttctttaggcgacattgctgctagtgtttttggtggctgggtcgcttatcggtcatttgataaacaatggcttgctgacattcgaccaactgttagtctaacggagctgctcgaaatgccatggcctagtctttcaatcgaattattaacaccgccagcagagttgtcactcttgattggttggacggggtcgcccgcttcaacctcgcacttggtggataaaattgcccttgctaaaacagaacggcaagccgattatcaaaacttcctcgcagctagcaaagcttgcttagaagcgatggtcgaagggtttcgtcgtaatgatttagcccagatccaagctgaattacgccacaatcgtgccattttacaagatctcgctcacttcagtcacgtcgctattgaaacgccaatattacagaaaatgggcgcattagccgaggcaatcggcggtgctgccaaaacatctggtgctggcggtggtgattgtgggattgtcattattgatcgcgctatcgaaacagaggccctctttgaacaatggcgggccaatcaaattgaacgattgaaccttgcagttcacctcgtagattaggagcttacccatggtcagacccaaacaatccattcaatctcatcggaaagatgaacatgtctttttagcggaaaaattccgccatgatgatgccatcaatgactttgatggaattcggtttatccatcaaagcttacccgaaattgcggtatccgacgtggatatcagtaccgattttgccgggactaaccgggccagtcccttttatatcaacggcatgaccggtggtagtcagcagacaaagaaaattaacgcacaattagcgcaagtcgcccaaattaccaacctaccaatggcaactggctcccaatcggtagccattaaagatccgtcactagcggatacatttagcgtgattcgcgaattcaatccccacgggtttgtactcgctaatattggtgctggtaatgatttgaatgtggctaagcaagccgttgcaatgacccaagccaatgccctagaaattcacgtcaacacgccacaagaaattgtcatgcctgaaggtgatcaagatttctactggttagacgagattgctaacattgtcgccaatgttggtgtgcccgttatcgtgaaagaagttggttttgggatgagtgctgatacaatcgcgcaactcaagcaaatcggtgtgcaattcatcgatgtttctggccgtggcgggaccaactttgtcacaatcgaaaacgaacggcgtcatgataaagcctacgattacttagctgattggggccaatcaacggtcgaatcgctctttgaatcacgcgctttccaaaatgacgtcaatatcctcgcttcaggtgggattcggaatcccctagatatcgttaaagcacttcgacttggtgccagtgctgttgggatttccggtcaattcttgcacatggttttaaaagaaggcccgacacaaatggcggaaaacttgctcacttggcaagcgcagattcaagagattatggcaatgcttggcgcacgcgatattcaagcgctccaaaaggcgccaattattctctcgcctgaattacggcattatttgaatgaacggcacataacattttaagcagcaaaagcccggtagaaggatttcttctaccgggctttatttgattgcttaattagcaactacgactttgccaatcatttggttcgtttcgaccagttgatgcgcttgccgtaagttggctgctgaaattgggcttaagcactttgtcagggttgattgcaatttgttttgttccaataaggttgcaatctgtcctaagataatgccttgactcgctaaatccgttgtttgatagtaggtctttgagaaaacccactcccaagcgaactcgacccgttttttagttaatttttgtaaatcgaccgggcgatgattttcagtgattgaagcgatgcggccattgggcttaatcaggcgcgccatactctcccagtgttgatcgatgttattcaactctaatatataatcgaccgtttgatagccgagtgcgtgcacctgttcaatgagtgattgatgatggttaacgacttgatccgcaccatgggccagcgcccacttttgcgtttccggacgggaggcagtcgcaatcacgtgcaatccggccaaatgtgccagttgggtggcgatcgaaccaaccccacctgccccattaatgattaggatggtttgatcatgattagtggttcgatcttcaaaatcaatgtgtaatttctcaaataaagcttcccaagccgtcagcgctgtgagcggcatcgcggcagcttgcgcgtccgttaaattctgcggtgcttttgcgacgattcgttcatccactaattgatattcgctattactacctggtcgtttaaagtccccaacataaaagacacgatcacccggtttaaataacgtgacggcattgccaattcctgtgacaatcccaacagcgtcccagccaagaatacggggcgtttttgattgtcctctacccccttttcgaatgccaacatctacagggttaactgaaacagcggtcacttgtacgcataaatcgtgtggttttggtttgggactggggagattaaaagccattaaactttcttcatttgtaatcggtaaatgtttggtaaaaccaattgcttgcattaaaaatgccttctttcttattcaccattagtctaaaacattaattgccccgtaacaatcgtgtatcgaatgtaactagttacattgttttcactaggcaaatgactgctagcggactataatggcggtatcaaaggaggccatttcatggttcaagaacggcacatttatgattgtcaggcgggctgcccggttgaaagcacgcttcaaattatctcgggtaaatggaaaagtgtgattatttatcaacttttgcaacattcaaatctccattttgatgatttgacgcgcgctttacccgattgttcgcgccgcatgttagccctacagctggaagaattaattgcggatcatgtgattactaaaacggtgattagtctccggccgttaaagactgaataccaactctctgaatttggtcaaacactgagtcccgtgattaacgcaatggcaacttggggaacttattataatcaggttgcacaacaggatgttggatactgtaatttgcagtaatgcctaaatttggatattctaatgtatacaaaaagccctaccgtattccggtagggcttttcgttgtgtggagttgctattaatattattttttggtacatccttagtgtagcaaaacctgggcagcattccagttacaagttcagcgaattgtccggaaagtgaacaatatcactaaattgtttagtcacttttaacgatttgctcaagctgcttcaaattaaaacataaccgctcatcaatcacctccggttcggtctgcagattattttcaaaccaacaatctaattggcgaatgattgcaccgccgtaaaagtcttccaagtgatttaactgttgtggcgtgtattgtgctttgtaatggcgcaatgccttatgaataatctgtttcataacctgttcaaaaaagcggcggcgttccggataatccgctagatgatataaattcaagcaaaacatgcgataccgtgtaataaattgaacgacttcatgacagccagattcccagtcgccactcactatactctcatcaactttttgaataatctgttgttcaagtgtccaccgaaataagccgcacatgcccgttggaaaatgattataaaaggtcgttcgtgataaattagccgttttcaaaaaagtcgcgaccgtcaatttcgccactctttgatccattaataattcgattaaaatcattgccatatagcgcttagtcgcttgtcgtcgtgtcatttacccacccgttctaattactattgttattttaccaataaacaatcattaacggtaatattattaacaaagattaattttatagcaatgaaaacgttatctaattattatcgattgcacaaaaaaagcggtgcgaatttgatattcgcaccgctttaacacattaattatttttctaaaccttccgcaactgcttctggatagttggctgtgacaattgcagcacaacgcgcacaaagcattgggaacttatcatctgaaccgatatcagtcttaatcatccgacaacgatcacaaacgtccccctcagcatgcgcaacactaaccgcaatgccatcaaattgtgtggcttctgctgggacttctgagttttgatccgcaattgttaattgtgagacaatcaataattgtttaacatcagcatccaatgaagctaataaagcagcattggcttcgtttggataaagtgttacggccgcttctaatgacttaccgatgaccttgtccatccgggctgtttcaagagcttttaagacatcgtcacggatccccatgaaggcattccaagtttcaactaagtcttcttcaccggcaaaatgttcaacttctggcatttcagctaattgaacgaattcttctggttcgtgtaagtagctccagatttcttcagctgtgtgtggcaagattggtgtcaataacttcgtcaaggctactgctactgcatagaaaacagtttgtatgttacgacgaggtgcatcattttgaccatcgatataaacaacgtctttggcgaagtctaagtagaaggctgataattcgttcgtcaagaacatgttaattgtcttataaactgtggcaaagtcgtaagcatcatacgccgctttacagctggcgatgattgcgtttaagcgcaccaacatgaacttatcaactgaacctaattctgcgtaatcaactgtatctttagcaggatcgaaatcagttgtgttcgcaatcatgaaccgcattgtgttccggatcttccggtaagcttcactgacttgttggaagttttccattgtgactttcacgtctgagctagcatcaactgaagcgacccagaggcgcacaatatccgcccccatttgtttgatgatcttttcaggcaagattgtgttcccaagtgatttactcatcttacgaccgttaccatctaagacaaagccttgtgaaataacagctttataagggctgacttcgccaactgcaacactggtaattaaacttgagttaaaccagccacgatattgatctgaaccttctaagattaagtccgctggataagttaagtcatcgcgagccgctaacacagcttgatgtgatgaacctgaatcaaaccagacatccatgatatctttttcttttgtaaattcaccatttggactcccaggatgtgtaaagcctgctggtaataaatctttagcatcccattcaaaccaaacgtttgaaccatgctctgcaaagagttgcgccacacgttcgattgtttctggcatgacgatttctgtgccgtcttcagcatagaagattggtaatggcacaccccatgcccgttgacgagagataacccaatcgccacgatcacgaatcatgttgtaaagacgggtctttccccattctggcatgaattcaactttttcgatttgtgctaagatttgatcgcggaacgcatcgattgaagcaaaccattgggctgttgcccggaagataacgggtttctttgtccgccagtcatgtgggtaactatgcgtgaagaagtcgagtttcaataatgaaccgttcttttcaagcgcttctgtcaccattgggttggctttatcgtaataaacgccttcaaaaccaggggcatcttcagtcataatccctttgctgtcaacgactgaaaggactggtaacttatatttagtgccagcgttataatcatcttcaccgtgacctggtgccgtatgcactaaaccagtcccagtttctaatgtcacgtggttgcctaagatcaccaatgattcacggtcatataatgggtggcgggctgtcattaattccatgtcagcacccttgaaagtcttcaagatttcaactgattcccaaccaagaagatcagtcatcttgttcaaacgttctgctgccacaacgtatttttggccgtcagctaacacttgaacgtaatcgaaagctgggttaaccgcaatccctaagttagcaggaattgtccatggggttgttgtccagatgatgaattttgtatccgcatctaataagtctttcccatccaccacgttaaacgccacgtacattgatggtgacttgatgtctttgtattcaatttcagcttccgctaaagttgattctgatgaaggtgaccagtaaacgggcttcttacctttatagatataaccttttttagccatttcaccgaagacccgaatttcttcagcttcaaaatcagctgttaaagtgatgtatgggttatcccaatcagcagaaatcccaagacgcttgaaatcttcgcgttgcttgttgacttgttccatggcatagtcgtaacaaagtttacgataatcaacgaggctcatttctttccgcttgataccctttttagccaaggcttgttcgattggcaaaccatgtgtatcccatccaggaacaaaaggtgcgcggaacccgttcattgatttgtaacgaacgataatatctttacttgttttatttaaggcgtgacccatgtggatgttgccgttcgcaaatggcgggccatcatgaagaacgaatgaaggtttaccttcatttaatttttgccgttgttgatagaggttgttatcggcccaacctttttgccaatcgatttcacgattcggtaaacctgctcgcattgggaaagctgtcttgcccaggtttaatgtttctttgatacgcatcaaatcactcctttatttttaaaaacaaaaaaagatcccgccctgaataggacgaaatcttcgtggtaccacctaaatttgaaggtcaatgaccttcctcaacatgcaataacgcgcattaagcgtcccaaattactcaattcatctggaatgaaataaggtgatacaccgctaaacagagcattaccaaccttccaccgtcgttggctcgcttaaatgatgttttgcttgctagtccttatttaaatctgttgcttggttttcaattgggttgtaagaatccgtaacagcttcaaccacttcatctgaatcggtgtcttcgactacatcggagagcacttcatcattgtcatcttcttcgactggtgtttcttcaccagggaaaataatggtttgcgttgttgtcacatcatcttcagcaatttgaccccaaggtttaacttctgcatccgagtttacttgatttgacccatggttgtcaaggtctgtcatatcaatttcagctgaaagagcttgatggtccgctaaatcatctttagctaataaatctgtccattcaggactcttaaccacttctaattgtgattcaagcataacttgtaatctttgacggaaaatccgtgtttgtttcttcaagtcatcggtttcgattgcaatttgttttgcacgttcagttgcatcgtcaatgatgtggtttgatttttcagttgcatcatccaacattgattttgcattcttttctgattcagtttgaatcatttcagcttcttttttagcgttatctttaacacggtcagccgcttcttgtgcaacaatgattgattggttcaacgcatctttcaattcattaaaatacgttactttttcatcgcttgattttaattccgcttttaaactttcattttctgttaaaactgattcgtagtctttaatcacttgatctaagaaatcattgacttgatccggattgtaaccccgcatttttgtgttaaattctttgttatgaatatctaaaggtgttaaaaccattttgaaattcctccatctttttcagcaattattttcttaaaatccccagtgtcactcgatatttttctttacgagtctgaccatcaatcgattggagttgaatccggccaaaaccacgaacagagacgatatctaatagtgctaattcaaaatctggtttatcaaatgcttgccaattcagtttaactttgttggcttgaattaattctttagcgcgttgtcgcgacagattgtaaacagttgaaatgatcgtatccaagcgaaacgagctgacagtcgtttgttcgaattgccaagcgtccttaggcgtcaacaactgtgtatagtcttgttcttgcaaatgaactgatacgcgaccaatcttagtgatttgctcttcgacatagcctgccatcttcttcgtcacaaagaattgccagcgttcttcatcggtcataatatccccaaaaacatcacggtcaatgccagcattcacaagcgtgccaagcaccttcccatgtgataggtttgcaaatttaatcgggtaccgaatctcaaataattgaatctcaaaatccgcatccgttggttcaaagtaatctggagcaatcattgcccgtttccgttcagcagcgttatatccgccattaaagtgataacggacgtcccctttttcaccgaccaaggtttgtaaaataaacgcttgacgcggatctaaaaacgccgttaagattggtcgatattcaacttgtgcttgctcaatccaatccaaaacctgcgcaacaaatggcgcctcgctttttctaaaatgttgatagacatctgcttgattgaccattgattacatccccactaataattgtgcgagtaagccgatcccacgttctactaaatataaaacgaaaaacgcagcaatggctgaaatcccaataccaccgattgcaggaatgaagcggtcaaagatttctaagaaaggttcaactaacttagcaacaaagcgccctaatttactgcccatcgcctctggaatccacgttaataaacaatagattacgacgatgccactataaatccgtaccacatacatgagcatcaagagcacataaaataaaaatagttgcacctagttcacctcaatatcaaaatcattttgatcgacaatatctgaaagattaccatcgatttcatagttcggtggcgtacataagaaaatctgatcaccaacccgttgaatttcaccgttgatggcaaaaactgcccctgttaggaaatcaacaattcgagtggcttgtgtcgcttcaattcgtgtgaagttaacaatcactgctttattttcaagtaaacttttgccgactttttttgcgtcggaataaatccgtggttcacataagacaattttattcattttagtagctcccgcagcttgcatcgagacgacgttattcgggcgaacacttggttcaccttcattagtgacagccgcagtttcttgcgtattagcatattcatcttcatctgacatgccgaaaaaattgctaagactaaacttaccagccatgagtcatcctccttagttattgcgacggcgcttgaaaaatggcggcacatcgtccccattttggttatcttgcttattatcatccgcttgggctgtccgtttgaagatatcgaaatctttcttttcaatttcatcaaatttttcagttgcttgcgcttgctcgcgggcacttggttcgcgacgcatatcccaatctacaaatggatcattattttgttctgatggtgttgaaggcgctgttgtctttggtgctgaattgtttgttgctggacgacgtttgttgttatcttcatcaatcccagttgcaataaccgttacaacaacttcatcaccaagattttcgttgattgaagtcccgaaaatcaagttaacatcgttagttgcagcttgttgcacgataccagcagcatcttgcgcttcaaacaatgacaagtctggtccacccgtgatgtttaagaggacttgttctgcaccatcgattgaaacttccaataatggtgatgaaatagccttcttcgttgcttcagctgtccggttttcacccgttgctgaaccaatccccatcaaggcagagccttggttagccataactgttttaacatcagcaaaatccaagttgacaaaccctggtgatgtaattaagtcagaaatcccttgaaccccttgacgtaaaacattatcggcttctttgaaggcttccatcattggtgtcttcttgtcaacaatttcgagtaaccggttattagcaatgatgaccattgtatcaacatgttgctttaattcagcaatccctgaagcggcgtttttaccacgtttagggccttcaaatgtaaatggacgagtaacaacccccaccgttagtgcgccaagatctttagcaattttggcaacaacaggggcagcgccagttccggtaccgccacccatgccggctgtgacaaagatcatgtcagcgccttttaaggcttcgttgaggacttcttcactctcttcagcagctttttggccgatttcagcagttgcgccggcaccgaggccgcgagtcaacttaggtcctaattggatctttgtttcagcttttgaatcttcaagtgcttgaacgtcagtgttagccgcaataaaatgaacgcctttaacgccttcgttgatcattctgttgacagcgttaccaccagcaccaccgacgccgattactttgatgattgcgccgctattttcttgtgctgcatctaatgaatattccatctgtttttcctcctgttacgactagcccttattcaaaaaagttactaaagaaatttttcaggccttcgaatgcattttttgattgatttttaggtttggttttcttacttggtacttctttggttgttgcttgagatttcattgttgatttcgtcactgtttggtctaattcagtctgtgctacattcccaagtgcgccttggaccaaccaatcaacttccgacaagttagctatgtagttaattaaactcaacccttgggcaaatgatggatgccgcaagcccatttgatctggaatgtataacttcactgggcaattaaagatttccttagccaagtcgacaatcccaggtaaagctgtcacgccaccggtcataatcaccccaccaggcatatcaaaagcgtgtactttatccaattcagctttcaaacgatcaaaaatctgcatcgtccgtgcttcaataatctcagctaattttttctctgtcacttgcactggtaaggcttgaccaacaacttcaattggaatttgttcttcttctgaagcagccaatgaatcagcattaccataatctcgtttagctttttcagcattttcaattgacgtgttcaagaccacggaaatatccttggtcatatggtcgccaccttcttgatcaatcgccgtaaattttaattgatgatcatgaatcacagcagctgtactttgaccaccgccaaggtcgacaacgattgccccaaaatcttgttccccgtctgataaggctagcttgccaagtgctaatgggttcactacgagttgtgatagtgttaaacccgctttttcaatacatttctttaaattatgaatcattgtcttgggtgcggtgaacaaaattccgttcatctcaagccgaacccccatcattccgcgtggatctttaatcccatcaaacccatcaaccgtaaacgattgcggtaagatattgaggatttcacgttcaggtggtaaattccgaaccaatgcggcactggcaacgtcttgcacatcttgaccagtaatttccttagattgatcagagaccgcaatcatcccttggcattcttcgatttgtagttggttggctggaattccagcaacaacccgattaatttcaatatttgctttttgttctgcttgttgtacggcttgttggatagcggtaaccgcttgatcaatgtccacaattgtcccgcgacttaatccgtttgatctagctgatccgacgccaatcacattaagttgtttattaattgattctgcaacaattaccttaattgaagtagttccgacatcaagactgacatatatttttgaattctccattaagtgtgtggaacctccttgcattcaattagaataaaatgattcctatgctaaatagtaccacatttcgactagatttagaaagccaatccaatctttttaaacagtgttaactaattttttgttgaatcagcctcagaattatcaaataatttggcgtaagcgccaacttctaagtcaattcgtcccttaccgtccatttgtttcgccagtgtgggataatatttaattttcttggcaagtgtccgcaaatccccaacaacctcattaccatcattcatatataagtgaacttgataaggattattgttcttaactgttaaacgaatttccgacacagcactttgaatgctgtttggaaaagcttgatatagttttaacccttgctttaagaaggcgtcatttttaaattgactatagacagggctattgccgagagactgcgtcattttcgtctttaaaatcgtgccattttctaagattggataatattgtttatgccgcactagatagcccaccgtaggatattccttaatcgccaatgtcagttgattaaactgatcaactttgacatttacgcttttcaccttaggtagtttctggtgaatccgcttctcaatcgctttttcctgccagatttgtgtcaggacgttattgccaatccgtacgccactcgcattaatcacctgttgatcaggcactgatttagtcccgttgaccgtcatttgttgaacgtcgctaatcggcaacataaaatagattgccacacaagcgcccaatgtgaaagtgctcaataacgctgtcaaccgccactttgtctttgccgttcgttgcgcttttagatgtggtagttgaccactaattgttggtcgcccaggcgttaaccgttgccgacgttgtttcttccaacgctttagttgataagcacgccaaacgtttagtaattggagcggatcgagcgacccatttttagttgtttttttcttcaagtcatccgcccccttcttaacttagatgatagtattaatcacttcaataatgcgatctgaagcgtctggaatccccattttcttagctgctttagccatggcttgttgactatcaggggttgccaaaagcgtatctaatgactgaactaatttgtcacccgttaattgtgcttctggaattaaaatcgctgcgtcttctttaaccaaactctcggcattttttgtttgatgatcatttgttacataggggcttggaatcaaaattgacggaatcccaagtgctgtgatttccgccaaactcgtcgcaccagcacgaccaacaatggcctttaaatctggtaaaatttcaggcatgtcgttgatatatggtacaacagccaaattatcgttgagcgtcatcgtctttaattgtgcttgaacatcatcaaaatgaacccgtccagaaacgaatagcacctgatactctcttgtattaagtgctggtactgcatcgataaaagcttggttaatacttggtgcaccacggctcccaccaaacacaagcactgtcggactgtcagtcttaagcccgaattcacttaaacgttcgtttggtaacattccagcaacttgttgggcccgcggattacctgttaatacaattttgtgcattgggaattggtcgctgactgattcaaaggaaatggcaactttatcgacaaagcgcgccaaaaagcggttggtaaccccggctgctgagttttgttcatgaatcaacgttggcacttttaagcgacttgctgcatatagcaatgccccagaaacatagccacccgttccaatcacaatatcaggtttgaatgttttaatcatttcttttgcctctttaacactgcgcaagaaaagttgaattgttttaatattcgttttaatgcccttcatattcatcgaacgtttaaatccttggatttctaacgtcttaaaatcgatgtcttgatctggcacaattttactttccaaaccgcgtttagtcccaacatataaaacggcatccaacaagtcgcgttgttgcattctttcaattagggctaacgctggatagatgtggccaccagttccgccaccagatatcattactctcattttagaatctccaatttaatctgtaatttgttcgactgccttaataaagacgtctccacgttcttcaaacgtcttgaactgatcccagctcgcacatgcaggcgacaataaaaccacgtcgccggcttcactagcagcataagcttcaggcactgcttttgttaaattatcaactattttgatgacgggaatacctgcttcacgtgctgtctgtgccaacaattgtttggtttcaccatataagatggttgcttttacgtgttcttttagtagtggtaataatggttcgaaagtaaagccccggtcaagaccacccgctaataaaacaattggttgtttaaaactcttcaacgcgacttcggtagcttccatattggttgctttagagtcgttatagaagcggcgaccttcatagctcgtcacaaactgcatccggtgtttaacaccggtaaaggtcgttaaaacatcaatgatcgcatcgtttgattggtccatcaacttagccgccgcaattgcggccaaagcattttcaatattatggtcaccagggacgttaatatcagtcactggcattatcacttcacccttaaaacaaagttggccatctttgacataggcgccagcttcagagttgcctagccgtgaaaatggcacaacttgcgccttagtttggcgactcaattcacgtagttcaggtaagtcccagttgacaacaaaaaagtcgtcagccgtttggttttgaataagtcgcattttcgcagccacgtaattcgcacgcgagccatgatagtccaaatgtgcttcataaatattcgttaaaactgcaatcttaggtttaacggttgttgtaccgagtagttggaaacttgataattctgtgaccatcacatcggcagccgtcactttttgggcgaccgcacttagtggaatgccgatattgcccgcagcgtatgcgtgcccctgggtgcgattttcatctaacatcaacgtaattaacgttgtggtagtcgtcttcccgtttgaaccagtcacactgacccattgggcttcagacacttcgtacgcaagttctggttccgttaaaactggaatcttacgcgcaatcgcttctgccaccattgggttatcgtaacgaatgcccggatttttgaagaggtatgcaaagttgcgctcaaataacgccaatggatgcgatccagtaatgacggttgcccctaattcacgcaattgtgcaacttgaggattgtcttcttgttcctttccgtcattgacggtcacaatcgcccctaattttaataacaatttagcagcattaaagccgctcttccctaatcccaaaactaaaactgcctgatcttgatacgtcgtgctggccttcattaaattcgccctcttctaaaaaattaacagataaattgctgaacagatgatactaaataaccaaaagctgatatcaatccgccattcactccaccctgacatttcgaagtgatgatgaatgggactcattttaaaaatccgcttatggaataacttaaatgaaccgacttgtaacatcacacttgctgtttcaatgacgtatactaacccgaccaatagcagtgagaactctcgatgtaataaaattgacatggctgctagtgcgccaccaagtgctagtgaaccaacatcacccatgaaaatttgcgctggttttttattgtagattaaaaagccaagcaatccgccaataatgctgaggccgaaaatggcgacatcaatttggttttgacgaaaggcgataattgtataagttgcaaatgagatggttgccaagccagcaactaacccatcaatgccatccgttaagttcaccgcgtttgagaaaccgactaaccacactaagacgaatacacaaaagaaccagttacttgaaatagtgccaattactgggatttcaagtgcagtactgaagccttcatggaaataaacagcgatgaagacaatcccaccaataatttgccctaacaatttttgccaagcgcgtaagcctaagttctgtttacggaaaactttaataaaatcatctgaaaaaccgagaataccgtataacaccagaataaacatggcaattaatagactattcgttaactgttttaagaataatcctacccaaatacttgaaacaacagcggcaataatgaataagagcccgcccattgttggtgtcccatttttcttagcgtgccatttggggccttcttcacggattgtctgcccctcttttttaaagcgtaaatacccgataaaaagcggcataaaaatcaccgtaattacaaacccactcattaagggcactaaaaattgtcctgctgccatttcataaactcctttaatccaactatcttattttaattgtacttttatttttttaaccccatctagcaacccattgaccgctaggctttgatgataagcatatccgctacctttgatgtcaatctcaacacctgttaattgcgcgagctttaagaggtcatttttcgaccaacccgtgacatctggcatcgtcattgccccattggtcattaaaatgactcgctgtttaggtaaaatcacactattggcctttggtaattgctggacgactaagttcccactaccaacagaagcggtttgtaggcctaaatccgttaatttcttttgtgcttcatccgttgattgaccaatcacagacggaactgttacttgttgttgtgtgtctttttcagcctttttggtatactccagtgcccgtttcatcattggattgaagacctgtgccaaaatactttcagcactatctgtcatattctgtggctgtttcattgtgacatataaaatatacttaggatcatcagctggtgcaatccctgatacagagaagatataattgcttgcgccggttaaatagccaccgtctagaccagtaatttgtgcggtcccggttttaacggctactttataatctggaatttggtaaacctgacccgtcccataatcttgataaacaacatcttccatattttgtaagacagatttggccgtgctagccttaattggtttaccagctttgattggttttacttgatgatcctgattaatcccagataaaatctgcggtctaatcattgtgccatcgttcgcaatcgcacttgtcatctgaagcatctgcattacattaacgttaatcccttgaccaaatgaagttgtggcctgatctagtggccgaacatattgcaatgtcccctctgtttcgccgggtaattgaataccagttggttttaagaaaccaaacttctgaatgtagtctttccaaaccttaggacccatggcttgttcaagcttgaccatcccaacgttacttgatcgtgcaaaggcttgactcagcggaatcatcccccagccactcgtttgccaatcgctaattttcttatcgccaactccaatcgaaccggattgataatactgattaggattgtaattaccagagtcgatggcagctgccaaggttgcaattttcaaaacagagcctggttcatagccatcttcaactaatgtatctcgccaaatcttgccaattccctttttagtgctggcattaaaggttggtcgttgtgaagccgccaaaatttcacccgttttagcattcatcaagacggcattcatactcttaggcttatattttttattgacgctcgttaataaagtttccatgtatgattgtaaccgagaatctaaggtcaagtaaatatcttggccgtttttagcggcttttactttgtttttcttttgattgatcgtgtatccataggaatcacgggcaaaattcttgtaaccatcttggcctgctaattgtttgttgaagtatttttcaatccccattacaccaacgaggctttgatcagcgccgtcttcgtcctttggtgattgagcgataccaatgacgtgagatgcgaatgttccattagggtacagccgcgtaggggactcattgaagtaaataccggttaaatgttctttttcaatcttccgtttgatgctcagtgaaaggttttggccggcacttccgaattcaacttgataaactgaacggttagctggcgttaattgtttatagattttttcttcactcaatggtagatagcgactcaaaactttcgctgtttttttcttatcagttacatataacggcttcttattaggaccaacgtaatcgtgacttaataccgcatacactgaataggcgttaatatcttgtgccaaaacgttccctaaagaatcataaattgtaccgcgttgtgcgcgaatcacggaatcagctttgtattttttctgtgatcgtttcgttaaatccacccctgcaatatgcccagtagcagcaatgtaagcaaaacgaccggcgaaaactagaaaaatcgccgcgataattagcaataaaagcctgccaaaaacgcgtcgattccgccgtggactcttacgtgtcttaactgatttcatttagacacgttccgaatattattttcatttagtttaagatcatgtttctgggcaaaagcattcagacggtcagagcttgttaattcaccgatctcctgttttaaatcattattgttagcgctgacttgggccatcttttgagtcgtactttctaatcctcgttgtgcattaacaactgcaattttggtggttaacaaactaaccaacatcgcgaaaaagataattccaataactgacgtcgctaatttttcaacagctgaaaaagccacttttttagactggcttgcaactgcttgtttatgtgcagtaggctgcgtttttagcggtgctactggcgtttctaattggcgtgccgtgttagttgccatcatcatcaatccttctagtcaatttctttttgtttttctgcgacacgtagcttagcgctatgtgcacgatggttttcttctaattcatcatctgttggtagaatcggcttgcggttcactaattttagaaccgttttttgttcttctggtaaaattggtaaccctttcggtaaatctgggagcgttgcttgttccttaaacatcgtcttcaccaaacgatcttctaatgattggaacgtaatgacactgatccgcccgccgacattgaccaatggaatagcttgttcgagtgaatcttcaattgcccctaattcatcattgaccgcaatccgaatcgcttgaaaaatccgcttcgctggatgtccaccctttcgtcttgctggtgcaggaattgcttctttaatcaaatcagctaattcgattgtcgtttcaatcggcgcaactgctctttgttgttcaatcttccgcgcaacttgttttgagaacttttcttcgccgtagcggaaaaagatcttaattagttgttgataggtccactcattaacgacattgtaggcactgagttccgccccttggtccattcgcatatcaagtggggcttctttcttataactaaacccgcgttgggcatcatcaaattgtggtgatgatacgcctaaatcgtataaaataccatcaatcttagtcacaccgtgttctgctaacgctgcttttaaatagcggaagttactcttaataaaagtcacttggcccgcttcagcatatttggctaatcgttgtttactacttgctaaggcatgatcgtcttggtcaaacgaataaagatgaccggtcgtcagctgagataacaaatattcactatggccgccgccccctaatgttgcgtctacatacacgccatcgggttgcacattcaaggcatcaaccgtttctttcaataaaacactttgatgtttaaatgtttctgtcatctatttaccatccttctaaaaatcaaaatctaacatattttctgcaatatcatcaaaattctcttcagcttcttcgctaaagctcgcccatttttcctggctccaaatttcaatgcggtttgagaccccgattaatacacattctttttcaagaccagcatgtttagcaagtgtgtctgggatattcacccgaccttgcttatcaggggaacattcgaccgccgctgagtagaaaaagcggacgaacgcgcgggtatcttttttagcgaggggcagtttttttaacttctcttccaactgttcccattcactaagggggtaaccaaaaatacaattgtccatgccacgggtgagtacaaattccgcacctaatgattcacgaaatttagccggcatgattaaccgacctttcgtatcaatcgtgtgatgaaattcgcccatgaacataaccattcacccctttgcccaccttaactgattttagtctaccacaatcccccactttctaccacattttgccaaaaaaaaccaaaatcttatcattttggaaccaattgtacacgatatttatattactagcctttttgaccaaaaaaaacagccatttcgttaaccgaaatggccgtttcacttgttaattaagtaagcttattttgggctgtcgcaccacttctaagcaacgccgcaaaaaattgctcactttaatctaatttttagaagtttaaaatgccagttgcagcgagtgaaccaaaaatgactgagcccactgtggcgattaacattacccaaacgaaaattttagtaatgcgactaaacgtgcttgtttgtttcttcaattattccaccacctagacttttttcttatcagcagtttacaccgaatcacttgaaagtgcaactcagtcctttttatcttttccaaaagacggtacaatgagactattaactttcgaggtgatttaaatgccatttagcacgacacttttctttgcaggcttaccgcccgtctgtgtcgcactcggctactgtatcgaccggttgactcagcgtctatttaaacatcgttttcattatattaattggctaccaattccattgctagtaagtgctatctttctgagtatgccaattttcagtaaagctggctggttcttttgcttagctatctgtctgtggggaatcatctggagcttaacgcgcttttactacgaccgtgcgctgtacctacgtaagtttctacggagttggtggcgctttgtcctcgtgatggccacagcatggtacctatcctttctaatcatcacactcctttaaaccaaaaaaaacggtgtcgactctttcaatttgtcgacaccgctttttttagtttaaaaaatatttccctaacgcgcttaattgcgtaattgtgattgtcggttgcaccgtgattggtaatcgatcaacatcgaaataggccgtcgccacatgggcgttaatccctgcttcaatatctaatgcacgatcaccaatcatcacggttttagttttatccagctgataacgatcacataaatcgttcaaactatctggcgccggtttcctggcaaatccgctctgactcgtaacaatttcagtaaaataatccgctagtccatgcgctgccaaaaatttttctgcagcatcatcacgatgggtcaataagaaattctgaccatgtgcactaatctgtttcaaaatcgccgctgcccccggataaggttgtggcgtctgttgtaattggtgttctaattcatgatattctcgatccaattgttcaaatgaaacattagtttgctgagcaagcatctgcagttcccgtttaattgaagtctgcttaatcgcttggtataagtgcgattgatcgactgcgacttgatgatcacggtaaacctgactgagcgccgtcatcataacaggataagtatcatacaatgtaccatcgaaatcccaaatcgcattttgataactcattaattatccattctcctttgtatcaaataggatagtgactggaccgtcattgaccaaagccacctgcatatcggctccaaattctccagttgcgacgcgaatcccagtcgctgctaatttttgattaaactgttcgtataagcgtttagcatagtccggtttcccagccgcagtaaagcttgggcgattgcccttcttagtgctagcaaaaagggtgaattgtgacaccgataaaatggcaccgtcaacctgggccaacgccaaattcatcttgccatctgggtcttcaaaaacgcgcaattgactaattttcttaaccaagtaatctaaatcagcttcagtatcatcatcacaaataccgaccaataacaaaaagccttggttaatcttaccaacaatcgtctgatcaatcgtgacacttgcttggctcactcgctgtaatactactcgcatattaagtcgctcctatccttgaacccgtttgacttcgtaaacatctgggatgttcttcacggcttccataatcgtttctaaatgatctgtattgcgaatgccgactgtcacatgaatatccgccatcttatcgtgatcaatccgccccatcacgttatttagctgtttcgtatgtgcatttaaggactgtaagacatcgttcaatagtccaccacggttatagccgtagatttccaaattcgcatcatagagttgatcattcttagcgttggtattttcccaactgacttcagtcaatcgactgttcatatctgcccgatcaacgatattcggacaatcgcgccgatgaacagaaaccccacgtccctttgttacatagccaacgatatcatcaccagggactggattacagcatttactcaagtgcactaagacattgtcgacaccttcaataacaacaccgtcttcatgtttgattgtgatatggctaccatttgctttaggccctggttgttgtgaatccttcgctgatagaatctcagcttctaatgctttttgttcactttcttcttttgcccgtcgttctttaatcgttaagcgattgacgactgactgtggtgagatttcaccgaacccaattgctgcaaacagttcttcttcggcattaaaattaaaatgcggtaggatgacagctatctcggctttagtgaggtgttcttttggtgtataaccatcttctaccaacagatgttcaacagccgtccgtcctttttcgacgttttcatcccgatcttcttttttaaagtagcgcttaaccttattccgagcacgcgcagtgaaggcgagcttaatccaatcacgacttggtgtcgcacttgttgacgtcaacatctcgacaatatcaccattacgtaattgatagttcaacggtacaattttgccgttaatcttagccccaacagcgtggttcccgacctcagtatgcactaaataagcaaaatccagtggcactgaaccctttggtagttcataaacatcgcctttgggtgtgaaaacataaacgcgatcgctaaagatatcgcctttgacactttccataaattctgcagcatcatcggaagcatcttgaatttcaagaatttcacggaataaatcgagtttacgccctgattcatccaccttaatctgttccttaacgccttctttatacgcccaatgtgcagcgaccccatattcagcaacatcgtgcatttcttgcgtccgaatttgcacttcaagcggtttgcctttgggaccaatcacagttgtatggatcgattgatacatgttggcctttggcattgcaatgtagtctttaaaccgaccgggcatcggtttccacttagtatggattgctcctaaaacagcatagcagtccttgattgagtcaacaacaacccgaattgcgagtaaatcatacaattcttcaaattgtttatgctggtcgcgcatcttacgataaatcgagtaaagatgctttggtcgtccataaatgtcgtaattcatatctaaatcagcaattgagtctttaatgtcttcaattgcttcttgaatataagattcgcgttgtgtccgcttagaattcatcaggtgcacaatccgatagtactgttgtgggttcaaataacggagcgagatatcttccaattcccacttaatcttactaatccctaaccggtcagccaatggtgcatagatttctaatgtttcgttagcaattcggcgttgtttttcgggtttcaaatgtttcaacgtccgcatattatgcaagcgatcggcgagtttgaccataatcacccgcaagtctttagccattgctaataacatcttccggtgattttcagccagttgttcttggtgtgatttatatttaatttttcctaatttcgtgacaccatcaacgattaccgcaacatctttgccaaacatctcttcaacatcacctaacgtgatattcgtatcttcgacaacatcgtgtaagtaaccagaagcaaccgttgcgggatccatcttcaattcagcaagaatccctgcaacttgaattggatgaataatatacggttcacctgattggcgaacttgttctttatgcacataagctgcaaaatcatacgctttttggacaaaagcaagatgctcagtattcatgtatttctgacataactgtagcacttcctgctgtgaaattactttttcttccggcatcctgcctcactccaattcctcttactcgattaaaaatgtactgaatacaacaaaactgactcaactaattaactgtcgagtcagtttgcttaacggcgttcatacgcagtactaattcctaagtaacttaataaacaataaataggaacgaaccaatagttataatctgcgtagcgcacaaccaccatcaatccaaataaaatcggcaggtacaaaatgtgataccaagctgcatgggtcttttgaacacgatacccaatcataaaggctgcgcaaccattgacagccatgaatagcagtccaatccgccacgttttatcgatgtgcaagacaccaaacactagcggtaaaacgaccgccaagagaatggccactaataaatagcgtacccaatccatttttaaataacgattattcataaatttagtcatgttgtgcccctctgtaaaaagattatatctatcatactataaagtagccaattctgtcacatacgaaatcgcacttaacagatataacggcgcggtctcggcccgtaaaatccgtggtcctaaaccagccatcttaaagccagccgccgcaagcatctcaatttccttgggcgcaacgccgccttctggaccaaaaacacaaagtaatcgatccccagattgggctgtttgtaagctctgaactaattgggaatgctcaccgtctttagctgactcttcgtaagccactaatttaatcgtcgctgattcttgtgcgaccgccgttaaactgttgcgccattcaatagttggtacatgcgtccggtgagcttgttcggctgcttcttgcgcaattttttgaagccgcgcaactttcttagcttgttttttatcatcccagcgtgcgactgagaattggctattacagaaaataaaccggtgtgcacccaactgcgtgcctttttgaacaatccagtctgttttgtcaccctttgacaagccgcatacaatcgtcgtctcaatcggtaattcaactgattttgtaattggcgattgcaccgtaacggtgactgttttgtcagttgcatccagttcagttaattcaccgatgaatgcttgttcatccggcgttaccaattcaacacgatgaccaggctgcatccgcatcacttttagcatatgatgtgcagtttcacccgttaaggtcacttgttgttctacttgaattgcttcatcaataaaataacgttgcatgccatactcctcttaatcgtcgtccgtcttttggcgtgtaatcaatgccacccagtcacccatatgaagggcttcttgaacaacaaaatcattcgccgataacgtttcacggacaagtgcttctttatctgcaataatgccggccagtaataggtgtccattgtcattcaataaagccttggcttggggaatcaagggcacgataatctctgctaaaatattggccacaatcacatccgctttcgttgtaatcccgttcaacaaatcgttgggatgggcatcaatgccagcggtcactgggttgagggcaaaattttccttagcggcatcaaccgcaacttgatccacatcataggcgcgaatatcattgactcctaaatgcgcagccgcaatactcaaaaccccagaaccagtcccgacgtcaattaaagattcaccgccgcgtaaaaccatttctaacatttgtacggatagatgggttgttggatgcgttcctgttccaaaagccatccccggatccatccgaatcagtgcttcgcgttcatcagtcggttgatagtcggtccaacttggcacaaccgttaaaaagcgagttagccgcgttggttgataatatttcttccaagctgtcgcccaatcatcatcggcgacttgtgccaatgtcactttaccagaaccaatcgctaacccaaagtcagtcaattgggcaacgcgttgttcaatcaacggtaatttttccggcacaaaaactgtttctgggaaaaaggcactcactgcagcacccgtttcaaggtggggaatactgtctagatcaataatttgatctggctttgcctttaaatgttcataatcggctgcgtcttcgatttggattccttccgcaccattttccgttaaaatattggcgattgcttccactgcttcattaacagtagcgaccgttacttttgtccattccatgtagcatgtctccttcttaatgcgggttgcttagtatttagggtaagcgtagtattttttcgctaattgatcatctgcttgagcgacagttgcttggaaaacagtgtcatcccagtttaagataaaggtttcttcgtctgattcatcattcacaaaagcggctaattgatcttcgccttcatctaataagtcttgtaaatagttgaaaaagccccgaccgacttgtgcgtttaaccccttgcgaccagcaaatggaatcactgctaaataattgtctgcatattcaaagccgtccatcttactttcatcgaagaataaaatcgcatcttcataactgatttcatccgattcgttcaattcaccattttgatcttcaacggcaattgcttgttccttagtcacgtttaatgtgaattccaattcaatcgcccgagcttgtttgtcccagttgatattcatatccccactaaattgtaaatcatctaattctgcatcgaaaaatactaacatatccatttcagccattatattcaccatatccttttaattagtcgttatttaagtcaattttaaagttgaacgtattaacatcatacctgattatgacttgaatctaaagcaatcattcaaaaaagcccagaacaaaatgtcccagactttcaatcgtaattctacttaatgtgctgcttggttctgaccccaataaataacgtccatactctgatcgtcataacgttggaactcaattccgagtgctgcatcagattctgccatcacacgaccatatagccgcatatcagcttctggcgtgttgccatctgggcgaatggcatgcatcaacataaacttagccatttctgattgtagatgggcttcaatcggggccaacggatcaaaaaccatcgtgacaaaccgaatatcactactatcgccatcaccaattaattcaacaatcggaaacccaccaaaattttgttgttgttttaaataagccaataactggtcaatctgttcttttgtgaaggctgatttataaaagaggaaatgccaagtttgtcgtttcatcgtgtcacccacccgttatttattacatatagtatgccatactgtcaccaacaacgcgaacttagtctttttttggtaattgattcgattttggttggtgatatgcctttttcaagccagcaaatgtcgcttgaatcttttggtaatgcatttcatcgttacgcgcatgcttcactaactgggtaaaatcgtgggactgtaagtccttttctgtttgttttttaaaccacaacatatcatcactccttatgtaattttattatacaacgaaacgttatcattgcagtcttaaatttacttttaaaccaaattgccgtaaactaacactattcattaaaggagtctattatgggaaagaagaaaaagcaaaacgcattatccaaaacattagttgaaaaaattctagataaacaaaaagtggcctacacccaacttgaattcccaacagaggaagtccacaacattgcccaaatgaaggccgatcatctcgatatcgatgaacatcttatttataaaacattggtgctctctggtaagagtaccggcccaatcgtcggtgtcgtcccgattgattgtcatttagacgaaaaaaaattaagccaaatttctgacaacaaaaaaattgcgatggtcccattaagggagctcatggccactactggctacgaacatggcgctaacacgcccgttggaatctgggaacaatcccactatccgatttacattgaccaacaggctgaaaaggaaccattcatctatgtctcatccggtaaaattggccgctcaattcagattaatccgcaagacttacagcgggtcactgaagccacctttgctgacatcagtgaagcctaaaaatatgataagaggggctagaacaattcacttgttctagcccctcttatttttgagtttaatctaagtattgggccaaattagcaccagaaatgatgacttgttccttcagcaaatttggttctttaataatattatgaaccaccgtttcgggtaaaacatcattttgtgcgagcatttgcagagcatcatcttgcatcacgacttttttaaccatattatgtattttaatcgttgcaacatatttttgcgattcccgttcttcaaccacttcgtagttgccgtaataatgtttatctgtcattaactcatccccttaaggttaataatatcatatttcaacaaataaaactaagtaacttatcctataataaggggaaactgttaaaaaataccaaaaaaaagcaaaacaataactgttttgctttttccattatagtaaggagagtacaggattatattaggactatattttaccgtagtaccagtatttctgtactcttctgggacaatattgggacaatagaatttaaaaatttaaatataatgtatttgctttaccagtctttttatcatgaataaaggccgtgtgtttaacagaaccgtctggattatagacatctgatttttttaaggtcatgacatcactcacccgcagtagggtggctttaccaacttgaaagatggtgtagttacgccgacccgcccgaaaactatctagtagagaaaaaactcccccttaagtttgaactaattaatttagaaatattatgtccatttacttcttaacagattttaaaattctatatattaaatacattagataattaaattcttcatttctccaaaacaaacctgtaaacagaatacataatattaaaatcgcaattatggagcgtacaattattcctgttagctcaccaatcagtacaaatgaagtgattgtgtaaaccatccctataattaaaactcctaaaattataaataaatattgcttgattaaaaatgattttacactctttttaaatccgtaatggaatatttgcctattttcccaccaactacttattaaaatagtcgttaatagagtacctgttaggacaccatttattccccaacctggatgctcctatcctagtatttggtacataaatttctgaacagttgtgccataattaataaaacaagataggagcattccaatgaaacgatatcaagatgattttaaagccagcattgtgaagatgcatcgtgaagagaaaagatctattcgctcgctttccgaggaatacggtgtttctccagccgcaattcataactgggttaaaggcgctaaatcagttgagctagaagacggtactgaagtaacgtccaaagaattaaaacaacttcaaaaggaaaatcagcgattaaaggaggaacttgaaattttaaaagctgcggcggtgttactgggaaagcattaggacgaattaattgccttgtcttcatagaagatcagttattgcgacaccgcttatcaattattctttcggcactgaaattaccgcgcagcacctattaccattggaaaagatatcaacctagtcaacacgaacgtgttgataatcagctcaaagaaaaaattaaattgatttgggaaaataattatcgtgcctatggttatccacgaataacgatggtgcttcgcaagtcaggcatctgtgttgggtcaaaacgaattttacgattaatgagggaaatggagattcactctttaatgaatcggcgatttaaaaaacctggcactcatgtggatcattcacaacgccccaatttaatcaagcaccagcccaatgcaaggatatggcgtgctgacattacttatttggaattacgtccaggaacctgggtttatctcagttctatttacgaaccaaaggttcatcaagttcttgctttcaagattggtcgtcagatggaggcgacgttagttgtagaaacgattaatcaggcgcttgaatgtcatcaaaagccacaatattttcactctgacatgggttcacagtacaccagcaacgaagttgaaactttacttgaacggcatcagatcagccactcatactcaaaacaaggttatccttatgataatgggccaattgaagcttttcactcattgttgaagagagagtttgcctttcaaacaactttttccaattttgaggacttggtaatccgaacctcaaattacatcagttggtttaattccgacagaattagaacgagtgtttagaaaaagatgtgccatttattgacataggagcagagtgtactacttcacaaataatttcaacgataaaattaattcagaaattcattttttgaatcatacatttagctaatgctcgtaataatttgattgatataagtttcatcatgcgaatcactaataacacgaccactgggaatctcatttacatattttcctttgataggtattcgtgtctgagcatgcattttaaaccattcgtattcaacatccgcatggccaatatctatcgcttgatagcccaaaatagataaatcaaatgctaataccgttgctgttggtcctaatgcaatcagaattaaatcatcaatatttgaatgttgtcgtgttacttttaatatttctgaataagaagcaaatgcgttgttatgcggacagataattcgctgtacacttttagtgttttcaagaagactattaccaacgccaaatctagtctggtctccttccaccaaaatcacatttttattattccataactcctttaactttttaaagtagcttaaactatcattcttgtttaccctatcaacataaggccttgttatatttgcatcataataaaccttatttttgtcagtaaactccagccacttaaatccatactcaccaattaaaaagcgccatgaatctgcactatagggcacatactgcttaaccgatttaaaaacatcaggaatacaaataatgatgtcctcactatctgatatcaaaattttgcgtagtcgctgtgccagctctggggaattatcttgaaacgaatttttattgttattcatcatccatttaaactcaccgtctccataacgagcaaccgagactttattttttataatatagtctaacgtttccgatatattcatcactttgggcttatcagaaaacaacataaacatcaagtatctgatcagaaatacaggatggcaaagtttcctaaatagctcatataaaaaagagtttgataatttatgtttaaaaaaatcctttattgtatgacgaagtcttttattattcaatctataaatatcctcctaaaacaaactatactcaattaaataaattattattatacaataaataactaattgatggccccacgtcaacaaactctatagtaatataaagtaataagttgactactaaaagtatgctcattattgacttactaatataaaatcctttttttaaattaaaatacataataaaacttacatagaccgcgaaagtagtattacgtgatattctcaaaaaattaccatcaatgaaactcaggggtatagttaacaacccaacacacgcaagcgccatcaatatagtaattttattttttgtattcttatttagctcattgttaagtattatcctacgatagcagaaataaactaaaatgaaactaaataatgcaattaaatcattaattatccaaccgttatgaatgctatcaaactgtaaataattactgacaccccgcattgaagataactgattccccaaaataatgataatattattggttactgttttattcatcatagcaataaacattagaaatattacaacaatatatatcttgagcatatttttcggagaaattcttagtataatatatattaacggatatattaagaatatataaccaagagactgaatagaagcagcaagtaatataaaaataatagaaataacaaatctttttttagtaaaatcaattaaaaaagttgttgaccagactagtaatgccatcattaatgaatttctaatttgaatagcatcataaacgaaaggagaaaataaatacaagatacaaaataaattagtattcttagaactaaatttcctcattgaacaaactaatagaagaaaaataatactatatgttagtatacgaaatcctgtatatgaaattcctgcatactgaaagggagtcatatagagtaagaaacccttatcatatgttgttgctttatacccaaattcatataaagcacgataagcattataatctggtacaaaactacttgtataaccaacaattatagtttgtacaagaaataaccagaataatgatatattactcaatgaccgcacattatttgttagtaagcagccaccgactgcaattatcaataatcctagtaacatttaatcacctaaattcacaaaataatattcatacttaaaactctatggttaattttaaaccactcagtataccattaaaaatacttattaatttatccttcttattgctttcatacaatattactaacgtaattatttttaatagacgtaatattgtcataaatgagataaaatttttatggtactttcgtgaaatataaattatattttgtgccatataaaacttgcggaacgctgaatgattctgtatttcgattttaaatcccaataatttagaatatgtaattttcccaatttcgtgtattaataccgcattattaactctgattatcttatagccgagcttcctaacacgtatgcaaaagtcaaaatcaacccaatctataaacatctgttcatcatattttccaaccttttcccacactgaaacatttgtaagcgctccagatgtaatacacttatctaataacaaagttgcttcacttgcaagagtttcaaaactagtatttctatctcttatggtgggacatataataccaacgctttctatttcaatgaaattaaaatatttttgtaacatatctttttcagctacagaatcttgatcaagagtaagtacccactctgtccgattattttgtaatgttgccattatctgatttaaagcagtagcaataccaagattttttatatttttaatcaaagttatgttgtaacctttaatcaactcagtaagctcattgatattatttgaattattatctacaatcacaagattcttacactgtttataaatagattcaatattcatacgtagtctctcaatatttggattataggttactattccaactccaattttaatcatgataactccttaatacttatcaaataatatttgcaatttacatataacaacaactggaaaaaaactatagttcagtttagaactaaataataattgaaacttttttctaatcgaatctctatacgttgctatgtttgttactaatacttcattatcctctctgaggtactttttaaattcccctgcaagaattctagaagtattatattttaaagattcttcgcggcttaaattaatctcttttaaaattctttttaaagtgatttttccggaagacgttgtattagtttcatatcgcctaaaataaatatatgagtgcgaatcatatatagtctttccgccaattgccaaatttagtctataaatccatgaatcatgtccagcaagttgatttatattatttgtgctaatactcaagttatttaaattgttattaaaaaccatcgtacagcccgctacactacttcttatcatagcatgaccaaaattaatatcttgtaaattatactgtttttcacctaacttttttagatccttatccactaaagtaagtcctgaaaaatataatttgtacttattgttacctttacctaactgtttaatcgcgctaattagtttgtcaggtaaccacacatcatcctgatcacaaaaagcataataatctgcagtatttttagctaatctacataaactaaaaaagctccttgtatatccaaggttatgttcaagaaaaacagttattcgaggatccttttctgcaaactttctaactatattcttagtagaatcacttgaaccatcatcccgtataaataaatgtactttaactcctacctgagaaagcacactttctatctgctcttctaaaaaacattctccattatatgttgataatagtaccgaaactgtctccatactaaattatattctccaagtcatttattatacaaatctactataaatatttaacataattttattgacacattttttatcaaacttttgagcaaccaatcgattattactgcccattttcttacgtaactcgtcattctctagcaagacttcaataccgtttgaaaatccaaaagtatccaacggatcataataatatcctgtaattccctgttttgtataatctctaataccatttatattagaagctaataacggtaaaccactagccattgcctcaattcccgcaagaccaaatccctcacgcaatgaaggcataatagcaaggtcagctattctatatatttcttccacatgaggttgatatcccaaaaaatgtacttgattatttagccctaatctacctaccaaatctctcaaatttttttcctcattaccaataccacataacaataaattaatatttttattctttagtaacgagattgccttaatagtcatttcttgattctttcgcttacttaactctcctacttgtattactgtaaatttattattaatttttaactttaattccttattaataggtgcgttcaaaaatttattagtatcaattccaacactaggaatataatcaacattctttgcatagaacttttgttttgccctgttaaaatcttctttattaatagttattaagtcatcagtaaaaccagataatattttttctattggataaaataacaaccagtctttttttcgcccacctgtgaagaattgaaaaccatgagctgtataaatcactggaatatgttttttctttccaactaatcttgccaaaacgctagctaacggggaatgagtgtgtatcaaagagaaacgagtctcacctgtaatatgaagtaattgtttataggccgtcaaattcgaattaatcgttccgattccacgagaaaaatcgacttgataatataaaacattatgctcttttagatattgtttaaaatccgtaacctgttgcttatccatagaatctccagattcgaaattggttgcaacacttatagtacatcccttatcctgtaacattctaatattgtcgagattgaactgttttatcatcgatgctaccgatgatatcattagaacattctttccctttatcattatctagctccatccccggtcactacaacacgaattgtctcaaagaaaatctcaatatcagtcaataccccaaaatgctttatgtagtacatatcattagcaagcttttgtgctggcgtatcatcgtaaccaccgtgaacttgagcataaccgcttagaccgggtttaaccaataaacgttgctcaaaaccttcaatgtcttcactgaattgttgcgtgaatattggccgttctggtcttggaccaatcaaactcatgtcccctttaattactgaccacaattgtggtaattcatccactcgagttttacgcataaaatgaccaacccgtgttacgcgtgggtcttctttctttgcccacattgcaccagatttcttctccgcatcactatacattgatcgtagcttagttactttaaacgattggcccattagcccaacacgctcttggctatagaagcacttgcccggtgtttctaacttaactaaaatcatagaaattagaataataattgaagctggaatcatcaatagcgttgcgaagattagatcgaataaacgcttaaatggtaaatagatgtgatgaaacggttgatccaatttagctacaaaatcatgttcatctactgtttgtgtatgactggtttggttttccatgataagattccccctaatccgttaacgattcccaatataactttaacccagtcataatatcataatgcggctgatagcctaaacgtcttaatcgtgtaatatctgcatatgagtgcttaatatctccaacacgttcaactttatgaataatttgtagctcccgattaataatttgttcatacacctgaattacttgattaaggctagtatgtttaccggcaccaacattaaaaacttgatgtacgatgttgctacccttcgtcaataggcataatgcttggattacgtctttaataaagacaaaatcacgcgtttgttcaccatcaccgaaaattgtaaattccgattggtgtttagctgcttgcgtgattaatgacaatacccctgaatacggtgatttaggattctgtcgtggtccataaacattgaagaaccgtaccgccactgttggaatattgtatagttttccataatcaattacaaaacgttcagttgcaaatttatcaattgcatacggtgtcaacggatcaattgttgagtcctcacgtttaggtaattcagaattatttccataaactgccgctgacgaagtaaacaacacttttttaacatttaatttattttgacgaattgtttctaagatgaaaatattcgcctcttgattgatttggtgggtttcatacggccgtgccaccgaatcggcaacactagcaatggccgctaataaatagatataatcaaaattctctttgagtaatagttcttgcataaagtcatggtcagtaatgctgtgttcgtaaaaggtcactttagatgagctaggaatgttactcgccaagcccattgataagtcatcaacaataacgacctcatcgccatcttgtattaactgatcaactaaatttgacccaataaaaccggcaccgccggtcactaaaactttacccaattatctttcctccaaattcaactattacctaaataaccaaaacttctttttttctttaacatggtggtactcactcggctctaagacatcgccgttaataatctttttggcgttgtcttgcatccaggtcaccatttccgccccattatgctgctccagcttagcgaacgccttctgcatccggaaattacggccctttaagttatgtgcgtcagaggcaaaaacaaagcctaagccggcatcaatgattcgctgcgtaaagtcttcgacctcagaaccaaatacgcctaagtagctgctggcggtgatctgggtcaagcaaccgctagccacaaaatcataaagcagatcgtgattcttttgaatgccgtgattgcgttcaggatggacgatcactggtgtgataccggctgcctgcagttcaaaaatcattttgtcggtgtattccggcacttcaccgtgggaaagctccaacatcaagtagcgattagtttcatcagcgaacaacacgtcatcatttttaatggcttgcattaagtcaccattgatatgtgcttcttgccctgggaagacaactaaatcgattttagcttcatccaacgctgcttgaaattctgcagtccgctgaatcacgtcagccttatgattggtatatttgccgtccatgtggtgtggcgtcaccaaaatatgactaataccgttatcgacagccactcgggccatcgctaaggcatcagccatggtatgcgccccatcatcacatcccggtaagatatgacaatgtagatcgatcatttcttatcgtccgttccgtaatacccaccgtagtaaccgccagaagctgcatctgtcacgcggttaagtacggcaccgatcaggttttttgagtaaatcgcgcgcccgtaaaacagcccctttaagagcgataccttgggggaccaccaagatcacgccgtcaaccttacttgctagaatttgtgcatcggtgaccctattaactggttgcacgcccagaacaattataccaaattgttccccaaattgcaagaacaaattagccacacgataaatcctattaaatcagtattttcattaatattcatattttatggacttaacttaaccggcggaagcagcggagaaaagctctttgggtgtttgatagccagtttgccggcgcggtaaaaggtttagttagttacttatttatcttctgtcccgtagtagccaccatagtagccacccgtattttctgctttaacccgattcatgatggtgcctaaaattcgtgcattaacgacttctaacaactcttttgccttggcaaccgaacccttttcaacaatcccttgtggtaccaccaaaattgtcccatcaactttgcttgccaaaatctgcgcatctgttactgaaataacgggtggtgtatcaaaaatcactaaatcaaagtgctttgtcaattctaaaattaatttatccattttctttgtatttaacaattcagacgggtttggtggtacgacaccacacggtaaaacgaatagatgatcaaccggtgttttttgaatcgcactatttaaatcgaaggtttcttccgttaatagtgatgttaagccttttttatttggcacttggaaagtttgatggactgttggacggcgcatatcggcatcgaccaataagacatctaccccttgatcagcccaggtcacggcaacattcgcacttaccgttgatttaccttgcgaagggcctgatgacgtgaagacaacactgcgcaacttttgatcgattgatgaaaattgaatattcgtgcggattgtccggaattgttccgcaataactgaagtcggatcagttaaagtaattaaaccgaccccttctttcatactatcttggtctagtttcttttcttttctaaataatcccattttcttaccctcttcttgataagcggctggtacttacgctcataatcgctttcttgattaaatctttttcagcaatattattaacaatccctagactagttaaccctaattcttccgttaaaaatccttcatcttttactgtcttgtccgttagttcacgtaaaaaggctatcccaactcccagtaatagacctaatacaactccaatcaaaacatatagattctttttgggagatactggatttaggttgggacttgcttgggaaataattgaaacattatcagttccactcataattttaggtgctttcttctgaaaagtctgtgctgttgtattcgcaatatctgcagcagtatacgcattatcagcctttacattaatggagaacacttgagagttttgattatttgcaatatcaatcatatttgcaatttgcccctcatttattttttcatcgttacctttattaatcttttcagcaacagtatccataataaccggtttcgtgattaaatctttatacgttgtaatcatttgaacatcagcttgaacttgattcagctgagcgccaacatcagtattttgtttacggttaactagcaactctgttgaagcgctatattgtggtgtaatcaaaaagaatgtcacgataacagctaataatgtacacaccactgtcgatgatagaattaaccggtgatacttacgtaaaataccgaaaatttgctcaatgttgattgtttgttccatgataccctccaaaagttaattaatgcttataactactttgcaacacgcgaaaagaagttaaccatcgctggttagcttcctcccgtgttattttaaatctaattgggttcttaaaagtctcgacatattcgccacttcagatgaactcatcacttggaaagattgtccgtcaatcatttgaccaattcccttcaattgatgcgtcttaaagttcattgcatccccataatttttctggatattaattgcatctttcaaggtaatattggtttgcatattattttctaagacttgtaaaaaattattataattcgtcaccatattcaatgaaaaagccttcttcaaaactgcttgtacgatagattgttggcgcaactgacgaccaaaatcacctctggagtcttcatggcgcattcgtgaaaatgccaatgcttcttcaccattcaaggatacgggccctacgctaaagtgatgtccatcttgtgtgaagtctaaatcattctcaacagtcaccccatcgaccgcatctactaattgttccaagcccttcatgttaaccagtacgtaataatcgaccggtacgttcaagaaggcttgcacggtattgactaccatcggaatgccaccgtaggcataagccgcgttaatcttagccgtttgaccgtaaccaacgattggcacccgtgaatcccgggcgatactcaacatgttggtttccttagtcgttggattgaccgttgcgagcatcattgtatcagtccggcctttttcggttcggcctagttcccctgtatctgtaccgagtaagaggatcgagaaaggcgtcttcttatttagttcgactttttctgaaactttgcgcttattttgtgtcttacctttggatttatacactgtcttggcggtttgattaacatccatatagaccttagctgcgaatgcgcccccggcaagaatcaataccccaagaacaactaaaatcacttttgttaatgtccaccctctgcgccggtgcttatggtgatggtgtcgcttctgttcttctgcagtcatccgtttcgtatcctcctcgaaaaataaacaaaaaaataatcaatcacattacatactatttacatactatttataatcataatattttctattgtagtataacttttattaaaaagaaatctttttctggagtacaccttaataaaaaacacttagttttcacactaaattgtgaataacccccttaacattgggcagtgattcaatattcaagatttttaaataattaaatatttttaaagtatcgaaagtgaaagtggtttacgaaatctaagtccatcaaaaaaccgatatgtaaaaacattagtttgacatatcggttgagataaataattttaattttagagactaaaaataggttgtaatcatccggttgattcccgaattcttacaacctatataattggttaacgtttcaattcatatttgtgctttgtctcattaatttttcggctgtcattcattttgatcgcgccgacgcgcaatgaagtcatgaaccttaccgcgactggcgttaacatgcccatgcagtgcttcttcaatcacaacattcaagacagccccaaccatcagaatcgttgcggaataattcagccacaagagtaagataatcaccgcaccgattgcaccgtaactattccatgacgtgccgaagtaacgaatatacaatgagaatgcttgtgcaagaattaaccagccaaccgttgtcagtgctgcccctggcagaacacttcgcaatcgcattttcacattcggaacgaagaaatagatgaaaatcagcagtaggaacaaggcaatccccgtcactggccattttaaactactaaaaatattaacgtaggtcttaggaatgttaaagattgggactaataattccaaaatttgttgcccgaatgtaaaaacaacaattaaaccgactaataatagaagtaataataatgtactccccaaagaaatcaggcgttttaaaacaaagttctgaactttttcaacacgatacgcgcggttaatactattttttaaggcattaatccccatgctcgctgcccacaacgtccccaagatcccgacggacaataagccatcattgcgtttcttcaatagggactgcagaactggcataatcttgtcgaatatcgtgggcggcaccgccgtttggacgtaatccgccacactcattacatctaactggaagtacggtaagatgttcccgataacgattaatagtgggaagattgataataacgaataatatgcgattaccttcgaattatcactaatgcttgcttctgatgaacgcaacatcattaacttcaccacagcaatcaacttctgccgtctggataagtcctgttttaccaccggtaactggttttgattgtctactgtcatatgtcactccaaattctcttttacacattagtcgttctacctgaaaggcttattttcccgacttcttaaggcatgtttatcatttctattatacacgaattaactatgggctaatagttttctgaaagcaaaaaaaaaaaccttctcattttagagaaggtttctaattttatagtaaatatttagcatccatttctggatcttgtgaggttagaatcttaggaccatctttggtaatcgcaattgtgtgttcatattgcgcacatggtgtgccatctgctgagacgtaatattcccagtcttcgccagggacttcttttgacttgatgtgccatgtgccacctaagatgaccattggttcaattgtgatggtcatcccttctttaaggcgcaagcccttgcccgcttcaccgtatgaaggcacgtttggttgttcgtgcatcgttggttgaataccatgtccaatcaattcacggacgtcaccgtagctgttttcaacttcggtatattgttggatggcgtggccgatatcacctaggcgattgccgacaacggcttgatcaatgcctaagtagagtgctttgcgcgtatcgtccattaatttttgtaattctggtgcgatttcgccaaccgcataagtccagcaagaatcactttcataaccgtccaagttaacggtcatgtcgacactgacaatgtcgccttcttttagaattaagttcttccgtggaatggcatgtgccacttcctcattcacgcagacacaagttgcgtacttgtagccttcaaagcctttttcagatgctttggcaccgtgttgttcgatgtagtcgtttgcgaattcttcaattacccagctcgaaatacctggtttgatgatgtcgcgcaaaccgcgatgaacgccggcaataatggcgccagaagcagccatccctttaatttctcgttcagattttaatgtaatcaaaatgaaacctccaatattgttaccattgtagcctttaattgtatctatttctatattatacgctatctgccattaaaatggacgaatcgtcgctttttagttcaattaaccgtgaaagagccgttgcaccttttcttaataaggggcttttgctataatgccttatagtataattcgttaattgcggccactgagcgccgcgtacgtgaaaggatgtcccaataatggcaactgctaaagtagtctatgcaagtatgaccggcaataacgaggaaattgccgaaatcgttgaagaagccctcgaaagtttgaacgtcgacgttgaaaccactgaaatctctcaagcagatcctgccgattttgaagacagcgatatctgtatcgtctgcagctacacctatggcgatgatggcgatctccccgatgaagccgttgatttctacgaagatctcaaggatattgatttaactggtaaagtctacggtgtctgtggctccggtgatacgttctacgatgacttctgtaaagtggttgatgatttcgcagccgtcttcgaacaaaccggcgcaacaaagggttcagacgttgtcaaagtcgatctatcagcagaagcagaagatatcgaacatcttgaaaaattcgtatcagagattgtcgcaaaacagagtgcgtcataagctcggtcagtatccgagcactaacctagtctggcacaggatactagcttataaagcacgtttcaaggcagagtgcgtttgaaacggttatgctttgagcattaactggatttgccgaataggtgatgcaatcacctatttggtaaatttggttaagggcagaagtatgtttcaacaagcacgtttcaaccaatcttccctgggccgcggttacgtccctttttaccgcggcccttcttttggtcttttagaccttaataaatcaaactaggagctgtctttatggctttcattaaacggttagtgtttaaataccgcgattttttgacctatacgatttttggttttttagcatcgttggttaatatttttacttactgggtatttcgccacaccattatttggccgtatttactcgccaatacaatggcgtggtttgtcgcgaatttatttggcttttttaccaataagtcgcttgtattccaatccaaatacaccacgtttggcgctgtgtgtcgtgaagtgctttcgtttttctttttccgtggtgtatcctttttcttggataacggtttgatgattgtcgccatctccttcttagggtggcagagtatgaccgccaagattatcgatcagttaatcgtcggcattgtcaactacatcaccacccgctacactttcaaaaaaacagaacaacaaatggcactccggggtcggattctccggcgatacaatgctattttgaaaagaggtcacaatgattaaagccattcaacaactcattcaaaaatactgggaacaattaatgtacttggtctttggtgtcttaacaaccctagtcaacatggtcgttttcttcggattagaccactatacaactatcaattatctcgtcagcaacacgattgcctggttcttatccgtgctatttgcctttttcaccaataaaacgtgggtctttcagtcaaaatatacaactttaaaggacttttcccgcgaaatggctagtttctttttcttccgtggtatatcatttataatggatactgcaattatgtttgttgggatttccttattggtatggcccaacatgcttgttaaagtgctagatcagattatcgtgattttagcgaactatgtatttagcaaatggattttcaaagatacttcggaggattaagatgactaagacgatttcaattattgtaccctgttataacgagcaagaatcaattccgcttttctacgcagcagttgagaaagtagcggctactctagccgaccaccgcatcgaatacatcttcgttaacgatggttctgctgatgaaagcctggcggaaatgcgcgcgttacaggcacaagaccctgaacacgttcactacatttcattctctcggaacttcggtaaagaggctgccttgtatgctggcttacaagccgcaactggcgactacgtttcagtgatggatgttgacttacaagatccgcctgaactattacccgaaatgattcacggcattgaagtcgaaggttatgactgtgtcggcactcgccggacaacacgtgcgggtgaaccccccgttcgttcgttcttcgctaaacaattttacaagattatcaaccggatttcacaaactgaaatcgtggatggtgctcgtgattatcgcttgatgactcggcagatggtcaatgccatcttagagatgtctgaatataaccgtttttcaaaagggattttcagttgggtcggctttgacaccaagtacttagaatataagaaccaagaccgcgttgctggtcaaaccagttggtcattctggggactcttcaaatattcattggatgggattgtaactttctcagaaacaccattagccattgcgtccttcgtcggctttttctcattcgcgattgccctgcttgcattaatcttcatcgttattcgtgcttttatttttggcgatccaacaagcggttggccatcactcatttcagttatcctaatggtcggcggtttacaactcctatgcctagggattgtcggcaaatacatcggcaaaatctacctagaagttaaaaacagaccagtgtatattgtgaaagaaaagaaataaagtgcgtttggttgcacttagcaactgagtattaagacaaaaaacagtttgaatccgcacgtttatctcatcaaaaaaagccctcgccattatcagtcaaaatgataatggtcgagggctttttcaatgctcattatttaaacgcttctggtttttcttttgattgaccaaaatgataagcaattgcatctaaaatccgttgagatgcttgtccatcaccatatggattcttggcatgggccattgcttcatatacggcttgatcatctaataattcaaccatggcatcatgaacttgttctggttgtgtcccaaccaacttcaacgtgcctgcttcaaccccttcaggtcgttcagttgtatcccgtaagaccaacacaggtttgcctaatgacggtgcttcttcttgcacaccaccagaatcagacatgatgaagaaactccgtgcagctaagttgtggaaatcaacaacatccaatggatcaattaaatgaatccgtgggtgattgcctaagatatcttgcgctgcttcttgcacaacagggttcaaatgcactggataaacgatttcaacatcatcatgggtttcaacaacttggcgcattaccttgaagacccgtttcattggttcaccttggttttcacgtcgatgcattgttactagaatcattcgtttgtcagcatcaacaacatccaagattgaatgattgtagtcgctttgaaccgtttgtttcaatgcatcaattgctgtattccctgtaatgtaaatagccttttgtgggtgattttcttgtaataagttggcttcacttttactggttggtgcaaaataaagatcactgagtacatctgttaattggcgattcatttcttctgggaatggtgaatacttatcccaagttcttagtcctgcttcaacatggccaatcgctgtttgattgtagaatgcactaatgcttgctgcgaaagtagtggttgtatccccatggactaatacgatatccggtttttcagttgcaatcactttatcaaggttcattaatacgttgctagtaatttcactaagtgtttgtcgttgtttcataacgtccaaatcgtaatctggtttaattttaaaaatttcaagcacttgatctaacatttgacgatgttgggcagttaccaccgtcacagcttcgaattcatctgagcgttctttcaatgctaatactagcggcgccatcttaattgcttctggtcgtgtcccaaaaacagtcattactttaattttagacacaaatttgcctcctaccatttaataagttaacacctcctatattacacgttttataagggtttgccaatccattgcagtcttattcccttgagtcaaatgaataacagtctgaatattaaaaaggacgcctttttaggcgtctctttttaataacattgcttcaacattcgcttgagcatcgcgtctatttctgcgtcactatagtgtaccaacttcgcattcgttaaggtcgccaaacccgtaataatgatccacgcttcgttaataatgcgttcgtgttctgactcactaaccgtttttaacggttgatagtcctccaatctagtttgtgtcaattgccccatgaaaagttgtgcttcatccttaccaaagtggttatcaataaataacgcacggtaaagttctggttcgattgtagcaaaatgaatatagccaatcccgagattgactaaggcatcatctgttcgttgttcttcactgacataccacaccaaacgcgccttggcttgttccaaaatggcttgcttgagattggccatattaccgaattctaaatagatgggttgtgtcgaacagtctagtgccttggcaaggctgcgcgctgtaattgcttttaaaccatccgctaataccatttcgtatgctttatccagaatttgctccgctttaatccgttttgtccgtgccatcgttcccactccttaaccgatcaatccgtttttcaatattatctactgtcactctaccacaaaattaaataacatgaaaacgtttttatctattttacgagttttttaaatcgccatgtgctatgataaacatattaaatcgcccttaaggaggaatttttgatgactactttccaacataatcttgaaaaatacgctgctttagtcgctaaaacaggaattaacgtccaacctggtgatacagtggttttacaaatcgctgttgatcaagctgaactagcccgtgatatgacagctgcttgctacgatctcggagcagcagaagtgattatcaaatggcaagatgatgacatcgatcggatcaatatgcaacacaaagccgaagatcgcctcgttaacgtgccagacttccagaaacaagaatacgattactggttagcaaataacgccaaacggatttcggtgatgtcgagcaatcctgataaccttaagggcctcgatggtgatcgggtcgctgctgttcaaaaggcaaacggtcaagcaatgcttaaagttcgccaagcaacacaagccaacaaaaatagttggattgtaattgccgcagctagtcccgcttgggcaaagaaagtctttcctgatatggacgaacaagccgcaactgataagttatggacagagattttcaaaacaacccgggtagataaagaagacccaatccttgcttgggaacaacatggcaagaaactgcaagccaaagccgctgaattaaacgctgcgcaatacaaagcactccattacacagctcctggcactgatctcacaattgggttacctgaaaaccacatctggatgggtggtcctagccgtagtagtgatggtcgttcattcgtcgctaacatgcctactgaggaagttttctcagcagctgatgccaacaacgtcgatggctacatttcttctacgaaaccattgagttacgctggtaacacactcaataacatgcaatttacttttgaaaacggcaaagtggtcaaagccaccgctgaagaaggcaacgatgtcttacaaaaactcttacaaaccgatgctggggtcaagagcctaggtgaagtcgcacttgtaccagatccttcaccaatttcacaatcaaagatcaccttctacaataccttatttgacgaaaatgcttcaaaccatttggcactcggctctgcttacgccttttcaattgaaggcggcacagatatgtctgaagaggaattaaaagcagctggtttaaaccgtagtcaagcccacgttgacttcatggtcggttccagtcaaatgaacatcgatggcttaacacacgacggtcagattgtccccattttcagaaacggtgactgggctgactaatgattacatggctcatgctccttggcgtctgcgtttgtctaaccaccttcttcattggactaaccgcctatagcgcctaccagaaacaagcgattggtggtctaatcattgtgtgcgttgccggtttagtcttaaccgcaatcgcggcattcttctactaccaagcactgacgcatttataattcgaaagggtcacgacaaaatttttgttgcgaccctttttgatgtgctagactgttggcatactttttgttcactatatcattattcgttagtaataatgattcgtatgtactggtataacaggttttatacaatgtttttgttgtgaacaattgctcaaaaacaattgataatccttctcaattagctataatgaagttaaatcaaccagaggagtccgccattatgaaagaattatccgccagtgcaccacttgaacatcgtttccatttatcagaacgtttgaacattatccgcgccggcgttttaggggcaaatgacggcattatctctgtagctggaatcgtagtgggtgtcgcgagcgcccaccaaagtcagtacacgatttttcttgctggtatttctggcatgcttgctggcgccttttcaatgggtggcggtgaatacgtctcggtcagcacgcaacgtgacacgcagaaatccatgatgcggcttcaaaaagaagccatccaaaacgaatacgctgctgaagtggccagtctacaacggacttacgaatcaaaaggcttacccactccacttgcacatcaggtagcttcagcgttcatgcaaaaagacagtcttgacatcacactccgcgaaaaatacaatattgaattacaccattacttcaacccgtggcatgccgccttttcatcatttttctcattcatgttaggctcattgctgccaatcatcgccatcctagcaattccatacccttacaaagtcagtggaactattggttcaattgtccttgcccttatcgcgaccggttacacgagtgcaacgttaggcaaggcaaaccgactcaaaggtgttttacgcaacgtcttaaccggcgtcttaaccatggtcgtcacctatttaattggtggttctatcggctaagcttcacttttaacctaaaatttgctatgctatatttaatttaatcgtcgccacggggcagttaatcacttcattaggtcaaagaagaagtgattggctgtcctttttttgtggccgatattattaggaggttctattgtgtggcatgggttgatttattgattgcaggattggcagaagtttggtgggcaacgactatgaagatgagtggtgggttcactaagctcaattacacattactgacgattgctggcatgctcgtcagcttcggttttctaattcgtgcgacgaagggattaccattgagcattgcttatccggtttggaccggaattggcgcagtgggagctattttagtcggcatcatcttattcaatgaacacatttctttattaacctggctattcgttattttattagtaatcggaattctcggcattaaaatgacgagtggtcattaaaaaataggcttacccattttgggtaagccttatttattaacgtgttctaattgccaactcgcgatagtttgaatcaactcgattggtaatgccgttacatctttttcgaattgtagtgtccctttgccggtctgacatggtgcgacagcttttgcaaaatgggccatcggttgattagtgggataaaacccgatgtgccgtttattaatgccaaaatagcaaactgctttaggctgataatacccaaccaaaccataagccagcttcatctctgcgtccggtaacactgcccaaagaatggtgtgcattgccagtgcgagtgttcgatcagcatcagttgtaaggcctgcattatattgctcaataactgtcatcttatccccacctttattttgctctcattctagcatgaaaccacaaaaaaagcccaaccgaagttggactcttgaaaaacaataattatttaacagctggtgtaccgaaccattcgatacgtgattcaactgtgtctttgattgcttttgtacctggtgcaagaactttacgaggatcgaagcctttttcagcttgatctttgttttctgcatagtattctttaacagcgtttgaccatgcgatttgttgttctgtattaacgttaacttttgagatacccatttcgattgctttaaggatttgttccttaggaatacctgaaccaccatgtaatacaagtggtaagtcaatagcgtcagctaattcttgtaaacggtcaaagcttaaaccttgccagttttcagggtatacaccatgaatattaccaataccaactgctaagtagtcaggaccagcagctgctaattgtttagcttcttcaacgtcagctaattcgccagcaccgatgataccgtcttcttcgccaccaattgaaccaacttcggcttcaactgagatgcctttagcatgtgctaaagcaacgatttcttttgtctttgctaagttttcttcgaatggtaaatcatgaccatcgaacataactgagttgtaaccaacttcgatacattctttagcagcttcgtagttaccgtgatctaaatgcatgataacaggaactgtgatgttcattgacttgattgtttgttcaaccaagttcttgcataattcgtaaccacccatatatttagcagcacccattgatgtttggatcaagattggtgtgttagtttcttgagcagcacctaagatagcacgtgtccattcaaggttgtttgtgttgaaagcaccaacagcgtaatgaccttcacgagcagctttaaagatttctgtaccattaactaatgacatgaaaaagcctccagattaattgcaacttttgcgttgcgatttttgaatacgaatctattttaacatattttgacctaatataaatcataaatccgtaactttctgaaagtgaaagcgtaatcattctgcttgattattttacaccaattaaaaagcacactagttaatctagtgtgcttttacgacaattgcttcaaagtgcgcccggcgagaatcgaactcgcaacctatcgcttaggaggcgattgctctatccagttgagccacgagcgcctatgagtcatattgtcgcatctgttgttttaattgtaaagttgattttaataaatctttattcatccgttaaaacggcgttcatcgtttcttgacctaaaaagaacacggcaccagccgctaatagtatcgcacccgtaaaaagtgtaaaaatcacggctactgataccccctgctgaattagcgcaccaactaaaaatggcccaaccacaccgccaattcgcccgatgccagctgctaaaccactcccacttccacggacaagtgcaggatattgttctggggtataagcatatagcgccccccatgcaccaagattgaaaaaggataacagcgcaccggccacgagtaacatggcaactgagtttgcattgccaaacaataatgcactgagtgctgttccgattagaaagccacctaaaacacgtttccgcccccatttttcaatcaaccacgctgctacaaagtagcctggtaattgtgccaaggtcataatcagcacatattcaaaacttttaaccaagctgaacccttttaagaccatcacactggggagccataaaaacatcccatagtatgaaaagaccactaaaaaccatacgagccataacataattgttctttggcgatacgctggttcaaataaaacacgcaatcgttgcatgaatggtaccttacggttaatcgtcgtcggttcatgctcttgtttaacatgtttccgtaacacaagtgtgtagatggcgggcaatgacgtgatcaataagaccactcgccagccccaaactggaatgacaaaataggcgagtaaactggcaactaaccacccggctgcccaaaaactttctaacaatacgacagcccgaccgcgcgatgccgttggcgtattctccgagattaatgtcgaggctaccggtagctcgccacccaacccagcaccgaccaataaccggagtactagaaatagactcaacgatgtactaaaggcagatatcccattgccaatcgaaaatactaataaggaacaaagtaaactgttttttcgaccaattttatcagctaaaatgccgaaaatagcggcgccaaaaaccattccaattgaactgacactcccaattaatcccatttgtgcactactgagttgccactctcttgcaagcgcagcaatcacaaacgatagcatccccacatccattgcatcgaacaaccatgcaccacctgcagcccataaaagtgtcctatgttcttttgtcatcccgcattactcccttatgttatgaatggtcctatcatacaaaaagagtttacagatgtcaagacacctaattatgcattataataaatatttatctgtttaagcgctgcgacaatttgcttaaatcgttgttctgacgcgcattcaatcgtgtgtaaatgaatgccgtcggttaatgttgaaagtaatttctgatggggcattgtggccattttttgcataaagcctttgacatctgtcaaggtgccgattcccagttgaccggtcagttcaccatacaatggatgatcaacggtcacgtcgatcacgcgccccccattttcaacaatcgttgtcaattcaagttcagtctgcccctgattatgctgacaggcaacttgtgcctgatatggcattgtttgttgcgtctgcgtttggtcgtaataaccgctaactgtcgcaataatttgggccccttgtgcgcgaagtaaggcgatatccccaacaattgtctgccggctaactttatattgttgcgctaatactttggcactgatgggttgcgcactcttttgaattgcattcagaattgctgtacgtcgttcttgcgttgtcatattgccacctcgtcttgatttcttacgctatattctaagcgttctaaaggcaaaaagaaagtggagggttgaaacgaactcgtttttccggttaacctaaaaatacatattatggcttttaaaacaaaaggcaggcgaaatcattttgtgatttcgtctgccttttttaattagtgctcagttgctgaccgcaattaagggcactcttattgaaacgtgctgtttcaaactgccttttccggttaaccaaaaacgcgaatcatgacgaaaagcgtcataatccgcgtttttaagttaatcctcaaagccaacccgtttgaatcagcactcttagaatgtttgtagttcttttgtcatgtgtgtgaaggcttctgatcctgtttctgttacgtggacacagtcttcaattcgaacaccggcaacgcctgggatgtagattcctggttcgattgagaaacacatgcctggcttgataatcatgtcgttgccttccatgattgatgggaattcgtgttctgaagttccaatgccgtgacctagacggtggatgaagtattcgccgtagcccgctttagtgatgacgtcacgtgcaatcttatctaattcagccgctgtgataccgggtttgattgctgcttgggcagttaagtttgcttcaagacagactttgtggatttcgagtgatttcgcatcaggtttgccaaaagcaacggtccgcgtcgcatcactcatgtaacccttatgcaatgtcccaaggtcaaagagcacgagggcatctggggttaaaatgttggcttcggggccaccatgggggttagctgcgttgatacctgattgtacgatggtatcaaaactcatatgcataacgcctttgcgcattaatgcgtattcgatttctgcaacgatatcttgttctgttttacctgcttttaaggcattgaaaccaacttcgaaagcataatcggcttcacggccggctgcttccattaaagcgatttcttcaggtgttttaattaattttaagttttccatgaaacgtgaagcgtcgcctgggaatgttgcgtctgggaattgctttagaatagcttcgtaacgttgaacaggaaggtcgtctttttcaagtgcccaacgtgtagggttcgcattccgtttcttgatttgatctgcgatgattgcgtatggatcttcgtgatcgagatagccgtaaacgtcgagtttccagccagcttttttagcagattcaacttctaattgtggtgtaaataggaatgggtcctgatctgcaaaaacaaagagggctaagacccgttctgcaggatcactttcgaaaccagtgaaatagaggatgttggttggattactgatgtaagccacatccatattattctcaccaagccaattttgtaattgggctaattgattattcatctaaagcacttcctttacaattgatatcactagtatatcacaaccaatgtaaacggtaatgtaaaccacaaatgaaaacaaaaatgtaaatttcatgaaaattagtgtaaaccgcttgcatttgctttaaatctctgttaaattaatcaagaagtaaaatgaaaactgctgaaaatataatctattttattttacaaatgaaaggaatcatttaatcatggaaaaacaaacaattacaatttatgacgttgcgcgcgaagccgacgtttcaatggcaactgtctcacgagttgtcaatggtaacccgaatgtgaaacccgcaacacgtaagaaggttcttgaagttattaaccgtcttgactaccgtccaaatgcggtggcccgtggattagcaagcaagaagacaacaacggttggggtcatcattcccgacgttagtgacatctattttgcatcacttgctcgtgggattgacgatgttgcgacaatgtacaagtacaacattattttggctaactcagatgaaaacaaccaaaaggaagttcaagtgttgaataccttattggcaaaacaagttgacggtttaatctacatgggccacagtatttcagacgaaatccgcgctgaattctcacgttcaaagacaccaatcgtgttagctggttcaattgatccagacgaacaagtgggtagtgttaacatcgattacgttgccgctgttaaagatgcaactttgaagttaatcaaaaatggtcatgacaaagtggcgttcgtttgtggtagcttgaaattcccaattaacagcaagtatcgtttatgcggttacaaggatgccttgaatgaagcaggcattgcttatgacgaaagtttaatttttgaaacagaatacagctacagtgctggtgaagcattgttcagcaaaatcaaagcaactggggcaacagctgctgttgtcagtgatgacgaattggcagttggtgtcttgaacggggcagttgatgccggcgttcaaatcccagctgaattcgaagttgtgacaagtaacaacacgaagttaactgaaatggtacgtcctaagatgacgtcaatctcacaaccattgtatgatatgggtgccgtagcaatgcggcttttaacaaagatgatgaacaaagaagacgtaaacgacaagacaatcctattgccatacagtatcgtagcaagagaatcaacaaaatagagtgctattggttgcggtcagcaattgagcattaataaaaaaatcccgttaatccaggttttaggattaacgggatttttagattaagcggaagttgttgcaaacaagagcacgtttccaccaatcaaaaaaggcctcagttccaaacgattttaaatcgttagaactgaggcctttttttagtttagttcgttgtctctgtatctgttggattggtattcgctgtataattcgtaccggttgtagtgccagtcgtagcagcagtaccagttgtgtttgctgtgtaattatttgtcgttgttgctgcggtgccactgcgacgactactgtagccactagttggatttaattcatcagcggtgctataggtaattgaaccatagccgttgttataacctaaatagtggttccagaaagtttcgtagttccgggcagaaccgccaatcccgaattcatagctagttgcttttggcgtccagttgttataaagcgaggtgacggttgaaccgttcaagttctgtgagctgccgttgattgaaaccgtgccaggtaattgaccagttaatttcaagactttgctgcttgtgaccgtacttggcttttcatgatcatcttccaaacgcatgaggcttgggttgatctgataaacgctgttggccaattttgaccagtatctttcattaatctggcttgagttgtcagttaagttacgaccagtactgtcataacccatccatgaagcgagggtgatcccaggggtactcccgataaaccagatatcgcggttatcatttgaagtcccggttttcccaactaagttgttggtattaaagtagagttgatcgtaaattgaagtagcagtcccatctgttaaaacgccggctaacatttggttcatgatgtacgacgttgcttttgaaaagacgcgtttcttcttagcgtgatgttggtaaacgacattaccggcgggatccgtaatcttttcaatcacgtaggcgtcggtatgttcaccttgatccgcgaaggttgaaaatgcactggcctgttctaagacgctgaccccatcactggtcccaccaagtgaaatccccagttgactgtattcatcagcggtgaggttgatgcccatcttactcatgtacttagaaggatctgttgtgttcttcaaagcgttataaaggttaacggttggaatattcaatgactgggctaacgcttcgtcagctggaatgaatttgttctggatcgtgccaccgtaatcggttggtgcgtaatccttgaagttggtcttgaaatcggccaacatcgttttagaaccaatcagtttctgatcgattgctggaccatagactaacaatggcttgatagttgaaccaggagaacgtttggtcaacatgtagtttgtttgtttgagtgagaaatcacgtccgccgacaaaagaaatcactttcccagtgcggttatctaacaagacgctcccgttttgaacaggggacgaaacggtcttttgtaaccccgtttcttcgtcagtaacggtatcggtataagtccgtccgaatgttgcgccctgttggtgaacaaccccttgcatggcatcgtaaatttcttgatcgatagtactgtgaatttgatagcctttagtgctgagtaattcagttgcttgtgtttcatattgtttgtagagatttggatctttgttaagtttggcagttgaaacattggcttctttggctaactgtttggccataatatcagttgcttgtgtttcaagtaagttataaacatagccataactcttcgttgtttcggctggatcggcttttggttggaattctttggttaagtcgactttcttagcggctttgtattcagcctttgtaatgcgatcgtcacgatacatccggaataacacggtatttttacgatctagaccatattttaagtattcaggatctttaagggtgccgtcttgatcatatggtgtatagacggaaggactctgtggcagaccagcaatgtaggcagcctcggctagagaaagatccttagcatttttgccgaataggcccaatgctgcttcttgaacaccagcgatattttgtcctttattgttacggccaagagtggcaacgtttaagtagtcttgtaagatttcttttttagtgaaatacttatcgacccgcaaggcgagcaagacttcggttgctttccgtttaaaggttacttgggaggttaaaacctgcatcttaatcaattgttgcgttaaagtcgagccaccggtttgtgaaccaaacccagtgacatcggaaataacggcccgcaagagtgctttggggacaaccccatcgtgtttatagaaatcctcatcttcggttgcaacaatcgcatcctttagataaggggacatctcatggatgttgatgggagtccgaattaagtcggttttgattgcgccgaacttattgttcttggcaaagtataaaccggctgcttgatcggtattatcaagttgttgctttagcacttgataactaggaattggttcggatttcattaacgcagcaaaatagcccgcgccaattccagcagcgagcgccatacagattaagctaattgagatcccatagagaaagatactcttaatggcttcaaagaagacgttaatcttaaaagagagtggtgattggctcaactcttggatgtaggctcttttttgttccttagttggttgtgcagaacgtttatcgggtaaatggagcaaatgtgcgagtctgtctttagcagatgtcaatagcgttgagaccttttgtctgctcgactggagcagtgctcgccatcgactggaacggtgctttggatcattcaaataataacgccaccttttttctcatactgtcccatattatataatagttcagcgcattatcatacccgatttcggatttgtaagacaaatgaaaaatatccagaaatgcacggcaatcaatgaatatagtgcaattggttaacaaatttgaatcagcagacacaaaaaggggggcgtttgctagcgattaaaagtaagcttttaacgaaatgccgtgaaaacgctaaacgttaggtataccaattatttagcgcgttttttagcgtcaaaaggcttgcaattgaaattttagccgtttataattggactataccaatgaacgacttgaatttttaaatgatgaggagataatcatgatgaaaattattaaagtgaaagatcaagtagaaggcggccaaaaaagctttgaaatcttcaaagaaggtttagcaaacaacgctaaagtattcggtttggcaactggtagttcaccaattaaattctacgaaacattagtggctagcgacttagatttcacaggttgcacatccgtgaacttggacgaatatgttggcttatcagctgatgacgaccaaagttaccactatttcatgaagaagaacttattcgacaagaaaccatttactaaatcatacttaccaaacggcttagcaagcgacatttctgctgaattaaaacgctatgaccaagtgattgctgataacccagttgatatccaaatcttagggatcggccaaaacggtcacatcggcttcaatgaacccggtactgcgtttgacagcaatacacaagaagtgcaattaacagaatcaacaatcaaagctaacgcacgtttcttcgaaaatgaagcagatgtaccaacaaaagcaatctcaatggggattggctcaatcttaaaagctaagaaaatcgtcttgttcgcatatggcaaatcaaaagctgaagccatcaaaggcacagtagaaggcccacaaacaacagacgtcccagcaagtgcattacaactacacgacgacgtgacaatcatcgtagacgaagcagcagcaagcttgttaagcaaatagagtgcgacagcaggcggttatgctctgaggattagtggcatatcgtgaatgagcggcaaagccgatcgttttcgatatgtaactaaccggaagagtatgcctgatggagcccgtttcaaaataagagtgcgtttgaaacgggtatcttctgagcattaactggatttgacgaattgacgatgaaatcgtcgatttgccaaatttggttaagcgcaggaagatgtttcaaaaagcccgtttcaaaacagagtgcgtagccagccgggtatatcccgaggattaacacaggatggcgaatgattgcgtcagcaatcgtttgacattcagggttaaccgcaaggatatggatgacggagcacatttccaccacaaaaaaatcccctacatcaaatcacgatgtgggggattttttgattgcattatttcaatgttgccatcactttagccattgcggcttgttgataggcgattgctgcttttttagcaaccgcttgttgttgatcagcagtcattgctggattggcttgcatagcagccatcacagcttgtttaccggcattttctgcgccagttttaagttgttcttgttgaccttttaatgttttagcgagttgtttagcttgaacatcacttagaacgaaccagcctttagcaaccttaaatgtgttgtgacgacttacgaattcgtggtcgttaccagaaattccgaaccagaatttagccgtattattttgataaacgcggtatttggtggttgtcactaagactgctttatcagcatttttttgaacactgttggttgtcttttcagtttgggttgctttgggtttactttggttggcatcggtccgataaagatagactttttcagtgccgttaccaagtgggtgatagagaagcattgacatgcccttcgcgtctgcgcttgaaacgagcgtgtgcgtcttagtttcggtcacagttttcattccgtaatgattgtgatcattttggacgatgaaaacgagtgaagcgataaatgtgagtccaaagatggtcattaagattggtcgccacatcttttgaccgaaaatcgatgaaaagaataatgcgagtgtgctgataacgagtgtaatgacgatcatgccttggcacccccattaatcgtagatttctttgaagagaggaagaatgtgatgatgaagccaatcacacagaaaatcacagcaacgatgaaggctgcgtgataaccagaaagggtggcatcaatcatcttatcgcggaaggccaatggtaatgtcttgaccatgtgtgtgcttggcatattgccttttgtaacactagaaagcacactgattaagatggctgtcccgattgagctggcaacttggcggaaagtattattaacagctgtcccatgactaatcaagttcattggtaaagcgttcattccggaagttgtgacaggcatcatcaccattgaaatcccaaacatccggacagcgtataacacaacgatgtagatgattggggtagtagctgttaggaagatgaatggcgcagttgcagccatcaataagaacatcccggtcattgctaagcgtttggcaccatatttatcaaaaatacggcccgtaattggcatcataatccccatcatgagggaaccagctaataacgttaagcctgaatggaaggcagattcgccacgaatgttttgaatgtatagtggcaagaccatttcggcaccgaccatcgccatgttcgtcacaccacttaaaatagcagcaattgtgaagacaggtgatttgaaaacgcggagttccaagaatgggttttccatcgtgagttggcgccagatgaataaagcaattaccacaacgccaattgctaaggttgtgagaacgagcgcatcgccccagcctttatcgccaacttctgagaagccataaagcaagctcccgaagccgacagttgataaaataattgaagggacatcaattttaggttttgaaagttgaataacactcttcatttggaaactagcgaggactaagacgagaatcacgattggaataatcatgccgaataaaacacgccagttgtatgaatcgataatccagcctgaaagggtaggccctaaagcaggtgccaggccgataacaatcccggccatccccatggctgttccccgtttttcaggtgggaagatggtgagcataatggtttgcaaaatgggcattgaaatcccaacaccagcagcttgaacaagccggccgattaatagagttgcaaacgagctcgttggtgcgatgtaacagataatagtcccgattaagaagacagtcattgctgacatgtagaggacttttgaattgaatcggttaattaaccaagcactaatggggatcataatcccgttgactagtaagaaaccggttgtgagccattgaacggctgaggtggacacatcgaatgctttcattaatgtggggaaagcagttgataaaatcgtctggttcaagacggtacagaaagtaccaatcaataagaccaagactaagactgtccgattatatggtttcccatgaatatctaatggtctagcgtctgacaagataaaaatctcctttgtgtgtttttgttgatgcgatttattagtttagacgcatttggtatctttgtcaagtaagttgacaaatgtgttatttaacttgacaatcccaatagattatctataatgaaaaataataataggaatggagtggggacttgcaaaaagacctttttttaaagttaatagatacggatcgattgatttttgggattagtgaagtttgtaaaatggcgggggttacaccgcgtcaactccgctactgggagcaaaaaggatacattaaagcgcgtgaattggatggcaataaggcccgcgagtacgacgcgcaaacaatgattaaggcgatctttatcaagcatttcttagatgaaggctacacgctaggggttgctgtacagaaaattcaaaaacacatggataacatgaaggttgttcgttcgataattcgggaacattttgagggaattgaagagattgatgacgaaatggctgttaatctcggttacttcgatgaaacaaagcaacaaatcttatacgcaattgtcaaagatgggcattcaacgtttaagctgatgcctgctgataaatgaaggcaatcaaaaaaacggtccaaagcgattaagctttggaccgtttttttgattgctaaatgtgttctatcagccatatccttccggttaaccctgagccgcaaacgattgctacgcaatcattcacaactttgtattaatcctcggtggatacccgacttacgtcacactctaccttgttaatctgtaaattgcatctgcatagattgcaatggcattcatgatatcttcaatgtgcatatattcatttgcttgatgcatcacattttcgcgttcttctggtaaggcaccgaaagcaacaccacgttctaagatacgaccatatgtgccaccaccgataacttgttcgtgacctttaagaccagtttgttcttcgaagacgcttaataatgttgcaaccaatggatcgtcaccaggcacgtaatgtggttcttgtgcatgaccgtcaattgttacgtcagcaagatcactaagtgtgtttgctaaaccgtcgcgtgtgctttcagcagtcacacctttaggataacggacgttcaagagcactgttgctacaccatcttgtgtgtagttgaagactgcaggacatgctgttaagtcgcccatcacatcatctgtgtggttgatgtttaagaggtgcccacgtgaatcttcgtgcattaagcgggcaattgttccgatgtagttgccacctttagtatctaaggcaaagtcagctaagaaagttgccaagtgtgttgcagcatttacgccggcttttggttcttgagcatgtgaacctttaccgattaagtcgatgattgtttggtcaccgtcagttgtgattgtcccttgtaacttgtggtcggcaacataggcgtcaaacttagcttggaaatcagctggcattgcacccgttaagatggctttagctgtttgtggcaccatgttggcgcgtaaaccagatttgaagctaaccaatgtcatatcgccatcagcaccgtcaactggtttgaaagtcatgaggtatgacacaatccctttttcaccattgatgattgggaagtttgcatctggcgaaattgcaaagtcaggttttggttcaacttcgaggtaacggttgatcccaacccattcactttcttcgtcagtcccaacgataaagtgcacttttttgtttaattcgataccgttgtcttttaataatttcaaagcataatatgctgcgattgaaggccccttatcatctgatgaaccgcgggcataaatcttaccgtctttgatcactggttcaaatgggtttgtttcccaaccgtcaccggcaggcacaacgtccatatgacctaaaatcccgaatatttcgtcgccactaccgagttcaatgcgacctgcaacgttttcaacattctttgttgtaaaaccgtcgcggtcagcgattgctaagaattgtagcaaggcatcgcgggggccagggccaagtggtgcgtcgtcttctttatggtcaacgtcgcgcgcactattaatcttgagtaaacttgttaagtcagcaagcatttgatccttatactttgctgcttcttgttgccaattcaatgtcattgcagtcccagctttcattgttaaattttaaccaaaaaacggttaattaattattaatctattcacattttagcatattattacaaatttaaaaagcgcttgccattaaaaaataaaaggttcacaaagtctccatgaaccctttaaggttagtgcttctttaaaatccgaagtgcgtttaaaatcgcgattaacgttaccccgacatcggcgaaaacggcttcccacattgtggcaattccaaaggcgcctaataataagaagatgcctttgaccactaatgcgaaaatgatgttttgccaaacgatgcggcgggtgtacttggcgatcgaaatcgcagttgctaattttgtcggttcatcggacatcaagacgatatcggcagcttcaatagcggcgtcagaacctaacccgcccatagcaacgcccacgtcggcacgggctaaaacgggtgtgtcgttgattccgtcaccaacaaagacgatttttccgttggtagcgcggtcttctgtaagtttggcgacggcggccactttatcttgcggcagaagttcgctttgatacttatcgatacctaagacggcgctgacttgttgcgcaacgggttggttatcgccagtcaacataattgtttgatgaatcccggcgtgttttagctgcgcgacagccgtttgtgcatctggtttgacggtgtccgcaatgacgatataccccaagtagcggttgttgtaagcaacatggacactggtgcccacttcactaggtgtgagtgttgcgatgccactggcttgtaaccaactagccttaccagcttgtaaaagttgtccgttgagttgcccgctaatcccgtgaccagcggtttcttggacgtcagataacgtctttgtgagtggcgtttggttagctgctaaaatcgattgaccaattggatgggtcgagtgttgttcgacaagggcagctagtgctaaaagttcatcaggttgttgatcgaccgaatgaacggtggtgacgctgaaactaccttgggtcaatgtcccagtcttgtcgaaaacaacggtttggacatcgtttaaagcttcgagataattactccctttaaccaggatgccgtttttagaagccgttccaatcccagcgaaaaagccgagtggaattgaaatgacgagggcacatggacaagaaatcactaagaaaatcaatgcccgatagagccaatcgccaaatggagcaccgaataaaaggggcggtacaatggccatgatggctgcaatgccgacaacaattggtgtgtagactttggcaaaccgcgtgatgaagttttcagtaggcgctttttgactgcttgcattttcgacaaggtctaaaatcttagcgatggttgaatcagcataaggtttcgtgacttcaagcgttaataaacctgattggttaatcgtcccactgagtagttcatcaccaggatgaaaggcgcgaggaacagattcaccggtaatagctgaggtgtccacgtaactgtcgccggtagtaatcacaccgtcgagcgggactttttcccctggtttcaccacgatgtgttcgccaacctgaattgcttcgggtgcaacaacttcggtggtgccatcagccgctaaccgattggcgatggttggtttaattgccactaagttagcaattgagcgccgggaatgattaaccgctaatgattggaaatattcaccaacttgatagaataacatgacaccaacggcttcggcatattgtccgattccaaaggccccaatggttgcaattgacattaagaaatgctcatcgaaccattcgccgtggagaatatttttgattgcggtccagacgatatcgtagccgatgactacaaaggcagctaggagcaacgtggttttagctggcgcgcttagagggacaagataagaaatcgccaagcctaaagagctgacgagaattcggatgagatcataattaatcgcatgttttgcgggggatggttctggggttggtgattgttgaatccccacatctggttcaatggttggcaaaagagtagcgagttgttgttcgaattccgtaacagcttcttggccggtcagttcatagtttaatttttgagtggtgaaattgacggagcaacttttaacgttggccatcttgttaacgttcttttcaattttagtagcacatgcggcacaatcgatgccggttaattgaagttgtgccatgttatttaggcctccttgttgagtgaaaagctaaatcgtaatctttactaaataaacaaacatatgagcatatattcatatgttgactataagataccaccaaacacgatagaatgcaatcgagatgatgggtttgggacattaaaaaaagcaccgaccaaagtgaatttgatcggtgtcaataggatccttagtgttcgttgacgtgggcgataacttgcgaaaagatattgatgacatggttgtcagctaatgaatagaaaacttccttgccttctttacgactttttaccagtttcgcttgcttgagtgcacgtaattgatgtgaaattgaggattgcgacatctctaacacactgacaatatcgctcacccgcaattcggattgaaagagggcgtacaagattttagcgcgtgttttatcgcctagtattttaaaaagaattgagatgtgatcaagtgtttcttcctttggaagagtattttggacggaacgaatcaattgttcataatcggatgtcataaaaggtgacctcgttagaatttaatggtagttagttgtagagaacgggcaaactggttaaacagttgtgtgtcgactggtggttgttggggcaattgcagtggcagtgctgggttaatcagtaagttggttggccgcaattgttggggaatttcacggtaaaagtgggttaccatcagcgattggtttgggttgaagtcgattaatgcttggcgactcttgaaccaaccactagcgactttcaaccagacttgattaccaacatagcgcactcctaaaatttgctgttgtgaattggcactaagataaccggttgtctgggtggggtgtagcggattattccaagtagcgacaatgttcgcagttggtttaatctgcgccgttttacccaccaataaagcagcggctttcgctgtttcaccgacgttgatgctgtcgctgaggacaaagcggttagtgccaatgcggtagtaagtttgatcggcaattgtaacggcttcggtgatgttgtagatatggcccgctttagccggctttttattgagggttggttcatatggattttcaacggtggggaggtcttgaacgtcattgacttgcccaattgtgtcgatggcttcactttctgcttgatcctgtgcggcctgatagtggcgtcccagtgccggatagttcgtgaccacgccgtcgacatttaggttgactaaccagttccaagtcgcttggttttcagacatctcattccagacatacactttttgatggagataatggagctgtttaatgatggttggggtgacgagggatgatgagatgttaatcccgtcggcgtatttaaaactctcgaatgagatccgctgtaaactgccaacgataaaaatgcggggaatctctggcattaaacgttgcatgttttgcagactagcgagggaaaaggaatggaccataacgcggtcttgcatgtgatattgttgaatcagcgccacgagttttgcttccatgtcctgcggatttccctttttggttttcttggtttcgatgaggaatttcgcatttgggttgttttgatagtgctcaaataattgatcgacgctgtgtggtggttccccgttactcattttgagttcactgagcttggcaaaagtattttgcgaaacaatcgcatcggtccccgtgacgcgttgtaagttacggtcgtgggagatgactaagacgccatcttgagattcgtgtaaatcgagttcgacatagttagcgccttgcgaaaaggccatgtcaatactttgaaatgtttcttcgggtgcgttgatggggtcgccacgatgagcgacaacggtaaaaccggttaaaaaccagaaacaaaggcttgttaatactaaaagcccccatcgtgaatgttgctgtgacaaatcaatggcctcctcaattgataaaaactactctttttaagataccattattcctttcaaatgcctacgattgttacagaactttaaagaaacggataaataaattaaaaataacaattgacaacgcttacattaggcggtatattatgtttgtaaggtacttatgcaattacctttttatcaattctctttctctcttatgccaaccactatctgcgggtagtggtttttttgtgtacatattggtagaataaacgtaactgaaatcggattagaataggaagtaacacaatggcggagaagtaccaaacatttgatattattgaagaaattacgcgcttagatggcacaacgtattatgaattggctaacatctttatgaatgggcgtgccgaactagcggctaaccggggatttattaagcaagtccggattttacaactcaacattccgcattcgaatgcggtccaaacttacgaagcttacattaatgaacgttacacaatgcctgcggttgattttgaccactgggaagaatgggaaaaagaagacggcgcagttgcgcaagcctttcaggagattttaaaagcaaatcatattggttaggtgggattgtgaatgacttatttcacagcggatacgcatttttttcacgccgaattattaggtaataatgattttgcgccgcgtccgtttaaagatgtagctacgatgaatgcaacgattattgctaactggaatcaacgggtgcaagctgacgaccaggtttatttgttgggtgacgtcgcaatggtgcccaataagccgagtgcttttgctgaagtcgctgctgtgttagagcagttgaatgggcagctgattattattaaaggtaatcatgataaccgtgcttttttgaaatatttggcgaaacatgatgcgggattatcagctggcaaggcgcattatcaatttgctgatgtcggtgagctaattaagatcaatcaccatcagtattttttaacccactatccgttattattgggaaaggtccaacagacgttcaacttgcacggacatattcatcattatatgttgccgattgcagagaatatcaatgtcgggattgatgcaccagagcgcgaattattacctgaacgggtgccgtttggaacaccccttgcggcaaatgagattgaaatcatttttgaacgcaaacaagccgcgctggcaaaccccagccacgactagctgaagggagtaagcaaaatggaaacaattcatattttacacacgaatgacttacattcacattttgaaaattggcccagaatgcggcgcttcctcttagaacatcaagcagcataccgaaagcaaggggatacggtcttgaccttcgacatcggggatgcaatggatcgtagtcatccattgactgaagcaacgaatggtcagattaataccgagttactcaatcaaattgggtatgacggagtaacgattggaaacaatgaaggaatcggtaatagtcatgctgatctggaacatttgtatgataaggcgaatttcccggtattactggctaatctgtatgaacaagcaacaaacgaaaggccagcatttgcgcaatcttaccgactaatgacgaccgatgctggaacgcgggtagcaattattgccttgaccgcaccatttttcttaacttatcggccgaatggttgggaaccgacgactgtcagtgaagagttgccgcggcaattagcggcgattgaaggtcaatatgacatcttaatcgtcctatcacatcttgggattacgactgataagtggctggcggaacaattccctgagattgatgtcgtctgtggtgcgcacacgcatcatcttttagaagaggggctgctggttaatcaaaccttattgacggctgccgagaagtacggtcattaccttggtgatatcacgcttgaactggatgatcagcaccatgtgatgcataaaagtgctcggacggttttaaccgcggacttaccagttgtgaagactgacgcagcagaaattgaaggctacctgaaaaaggggcacgcacaattagccgccgagcatgttgccaagttgccacacgcttttaaaatcaacgcaattggtgaatcagaaatgatgacgaccggtttaaaggcaattgaagaagcgaccagcactgaagctgccgtattgaatactggcttgttcttgcaagatttgcaggctgggattgttactaaagatgatttgcaaactcaattaccgcatccaatgcatctgattaaagtgacgctcaaagggtatgatttgtggcggatggtgcttgaaatggagaaaaaccggctctttttacgcaagtttcctattaaagggatgagtttccgtggtaaaatctttggagacatcgtttatgacgggatagcggttgatatgaaattgcggcgcgtcttttggcatgggcaagaaattgatccagaagccagctatacgttgacgaccgtcgatcattatctattcattccattctttccaacaattgagattgttggcgagaccgagatcgtgttccctgattttctcagagacgcggtcgctaaatatttaagtaaacattatcccttataagggaagaggaggttcgctgtggcggatacgaaaaacagtcccaagattgccaagaaagtgaccaaggcgattgaaaaagaaatgatcgcttcagccaaacaaccggaagtgccacaacacgttgtcatgaagactgaaaccacgcttgagattgataaatgtgcttatgaagtcgttgtgaactatcgtgaaggcttcgacgctgaaaagttgaacgaacgctataatgaagtgttggctaagtacgattatattgtggctgactggggctttgaacaactgcgtttgaagggcttttacaaagcaaccaacaaacgcgctaataaagatcaattaatcaatacgttacaagattatctatacgaatactgcaactttggttgtgcctactttgttttggaacgtcaaggcaagccaatcattaagaatgagaatcggcggagtaatcgccaacgtggtcagcaacggcgtcggcgtcaaaagccaggttttacagaacggaaagtcaccgataacaagcaaaaagtgactaaagaacgccctcaaaaggcggtaaccgagaatcaaaaatcagttaataagcgtcattttaagatccgtcctttggaacacaataaaaagtaaaacgtaattggagttagacaactatgacaaacacagattatgcagggtatttaattgatttagacggcaccgtgtatcgcggccgtgatcggatgccagaagccaaagatttcattgaacgcctacaagcaaaacaaattccgttcatgtttttgacgaacaacactacgaaatcaccagctgctgtgattcagaatttggcggataaccatgacattcatgcgacagttgaccaagtgtataccccttctttggcaacggcgcgctatctattgaatttaaacggtggtacagcgaatggcaaaacggtctacgtgattggagaactcggtttgaagcaggctctatcagatgccggttttaggaccaatgaattcgatccagactacgtggtagttggtttggattatgatgtgacttatcacaagtttgaattagcaacgttagcgattaagcgcggtgcattattcatcggcaccaatgcggatacgaatttaccaaacgaacgcgggctagtgccaggtgctggttcagtgattgcgatggttgaacgggcaacgcaacaaagtgcactctatatcggtaagcctgaaaaaatcattatggaaatggccttagagcaattcggcttgacgaaggaacaagtggtgatggttggcgataactacaatacagatatcaaggctggcttgaatgcagggatggatacgttgttagtttacactggtgtttcaacgccagaggatgtggcaaaagaagccttgcaaccaacgcatatcattaacgacttaaccgaatgggacgtttaaagcgggttagaagtaccactagttgggcggcgttgtatttggcgttagtcagcagtgcgattttaataacgttattgttaagctgggcactttatccgctagtgagtcactacctcgatctagcgagtcaacgggaattaacgcaaccgcggctgatgatgaactttaaccggttaatgggctacttacttgtgccatggcaaccacgcttacaactacctgactttccaatgtcattggatggtcggcaacattttgttgaagtgaaacgcttgtttggtttagcagtagttatttggctagtaacgattggagcggcgattcagcattggcggagtcggcgcaagaccaatcgggtttggcaatacgtccgcccaatgcaagttgctcttgtggtgccacccatattagggtttattgctagtatgaatttcgatcggtttttcattacgttccacgaattattgtttcgcaatctgaactggcagtttgatccaatcactgatccgattatcttagtgttaccggaagtctattttggcctttgttttacactcttcttcattttgttagagggtagttttgcttggctgttatggcgcggtaaacgtgcgctataacgtttggctttttattaagaaaatgcaaaagtgattgctttgatgcatggattcggtatcctaataagggatatatttttaaattgaaaaagagtataggagaaatcgcatgacgcagttaattgattttgttttacatattgattcccacctggtcaacattgttaatcagttcggcaactggacctatgtcatcttgtttgccattatctttgttgaaaccggggcggttatcttaccgtttctaccgggggactcgcttttgtttgccgctgctgctttggcagcccggactgataatgacttgaatgtctggctgtttgctgccttgttcttaatcgcctcaattgcgggtgattcattgaatgaacaaattggccaacgggtcggtttagccgccacgaagaatcggttcttcggcaagtttatcaataccgagaaaattgaagaggcgcaggtcttctttgataagtatggtggtaaaaccattgcaattggccgtttcatgccgattattagaacattcgttccatttgttgccggtgggagccagatggccttcatgaagttcttccgttacgacgtgattgggagtatcttgtgggtgacactctgttgcggagctggttacttcttcggaaacattgctgttgtgcgtgaacatttctcactcgttgtgttagggattatcggggtctcattgattccgatggttatcacagcggttaagagtcaaatgaaaaaaaataatgcttaataaaatactaaaaagtcctgcatcaacggttaaaacgttgatgcagggcttttttaaaacgtgctttagctagcaacttcttccgtttagccacggtttgcaaacggtcggctgtgcggctcattcactaaccgatgctatactcagaagctaaccgctagttaaagcactcttatcgaaacgtgctccataagccaccttcttccggttagctacggccagtaaatcatcgactgcgtcgctaatttactggactaggctaatcctcagaaggtaatcgggcatattgcgcactcttacataatggacgtgctgtgtagtggttggcgtttttctgggtagagattcgttagtaactcagtcacagccattggtgcttcaccaaatccgctggcaattaacttcactttaccagggtaggtagcaatatcgccgatcgcatagatgttcgggatgttcgtctcgagttgttggttaacagcgacttgatggtggtccaatgttaatccccaatcacggagaattcgagtatcagagataaacccatagttaacaaggagtttgtcaattgttagctgctcttgatcggttgatttcatcttgtttaaagttaatgcgagttgttggttcatttcggtcaaactatcgattaaaaacggcgtcttaatttggacagttgattgtttgagtgcttcaacgctactttcaagcccgcggaattgatcccgacggtgaattaaatagacttgtttagccactttttcgagcattagtgcccattcaatggccgaatcaccaccgccagcaacggcaacggtttgatctttgaactgcgccatttcttttgcgaagtagtgaatatagtgattttcccattctggatcgtaatcgacagcgagttttcgcggtgtgaaagccccgttcccaacggcaatgatgatgcctttggtgcgtgtcgtgcccttcgttgttttaagaacgaaagtcccatcttcttggggttcgataccttgcacagcagtggataattgcaaggttggttggaaaagtgccagctgttcaattaagttttcggtgagctgtgcaccagagataccactgaaaccagcgacatcatagatttgcttttctggatagagtgttgcgacttgaccaccgagttcggggagactttcgataatctgaacatcggccttgcgcataccagcataataggcagcaaacattccgacaggaccgccgccaataatggtgatatcaaagagatgatttgaatcaagcatgagataacttccttaatagtagatttcttaaattagtatactagaaaaaaataaggaaagcatgtttaatgaaataatcgtagtaatttatgaagcaattcgctatcataatgattgtgagtcaaaacaaggaggacgattaaatgacatatccacaattagaccttgcaaactttgcagggccaacagctacttttgacacaaaccgtggcgaatttacagtagcacttttccaagaccaagcacctaagacagtagaaaactttatcggcttagctgaaaaagattactatgacggtgtgattttccaccgggtcatcaacgatttcatgattcaaggtggcgatccaaccggtactgggatgggtggcgaaagtctctggggccaacctttcgaagatgaattcaaccaagaagtctttaacttaaatggtgcattatcaatggctaatgctggtcctaatacaaacggcagccaattcttcatcgtaacaaacgaacatatcaaccaaaacatgttgtcacaaatgccaggtgctggttacccagaagaagtcattacggcttatgaaaagggtggtacaccttggttagattttaaacatactgtatttggtcacgtcttgagtgggatggacgttgttaataagatcaacgctacagaaacaggaatgcaagacaaaccagttgaagaagttatcatcaatcacattacgattaatctttaattttaattgaagaggtgttttagatgctagtaggtggaattgaaggagggggcacgaagtttgtctgtgccgtaacagatggaaaaaatgggatacaagaacgaattagtatgccaaccgagacgccggaacaaacgatgccacggttatttgaatattttgatcaattcgatcatttagatgccattggtttggcatcgtttggcccaattgatgttaacccgaaatcaaaaacatatggctcaatcatcgatacacccaaagcagggtgggaacactatgatatcttaggagcaatgaaagctcattatcctgatacccagtttgcttttacaacggatgtgaatgccgcagcctatggtgaattgaagatgggcgctgctgatggacttgatagttgtgtttacttaactgtcgggacggggattggtggcggtgttgttgaacacggtcagattttacaaggttacagccatcctgaaatcggccacatgttaattcggcaacaaccagaagattcatacgaagggacatgtccttatcaccacaattgtttggaaggcttagcagctggtccagcaatcgaacgccgttggggcaagaaaggccacttattgccggctgatcatcaagcatggcaaatggaagctgactatttagctcaagcttgtgtaaatattgctttaatgctatcgccagaacgaattgtcttcggtggtggggtgtcgaaacaagcccaactattcccaatgattcgtgaatcctttaaacgtcaaatggcaggttatgtgcaaacgcctgaccttgatgactacatcgtgcatgttgcattaggggatgacgctgggattactggggcacttttactagcagctgatcaactttagttaaatgagaacctgagggatgtttcctcaggttctttttacatattatagaaggaattgtataaaaggtcttagccgatagcttgccttttactaactggaaggcttaaaatagataggaatattgaaatggaggaaaatatgggttatcgaattggacaaaagattacaggtactgtaacaggcattcaaccatatggtgtatttgtttcattagatgcaacggtccaaggcttaatccacatctcagaatgtggtcatggttttgttaaagcgttagatgaacagtttaaagtcggtcaagtgttagatgtattagtgttagatatcgatgaatacacacataagattagtttgtcgttacgtgcgctacataaagcacaagatttagcaccacagcgtgctaagaaacactattggacaaatcgccggattcatattgggtttgcgcccattgcagaacgattaccaagatggactgaagaagcgatagaagacttgaataagggtgagaatgtatgagtgctaaagtagccggaacgattatgtataagacagagcaaggacaatatgattttttggtccaaccacaagttgatgcttcttataagatgctggtgaccaataagcaagatgatcaaacaccacttgctgctgtattaattgcaatccaagcacagctaaatattgatgttaacgaattgagattgatcaatttagcgaatattaaccttgaaggtgagaacgtttcgttctttgtctttcagtggggagctcatgagactgatttttataccgaacaattgagaataattagtgaagccggttttcgatttgcgaaccctagtgagttcacgaaattactggataagttagaagtcacgagtgttccgcacttgaattagttcggacaatcggtgaatatctattcaacaatgtacgcttttgaaactttttatatttttattcaaaaaaaagtaaacaatcgcttgacgatgtcttggattgttggtatagtattctatgttgtcagcgagagaaaagctcattgctaacgaaataacgggtcaaacgagattgaataaatattcaaaaaatatttatatttataaaaataaactaggtcataactcatgagttgtgaccccttcgcatcaaaggttcttattggcgttttcagaaaattcgtaagtttatctacaaattaaaataatccgaaaaacatcgctcaaacattggttttaaaaggtttttaatgaacgattgacaattatcgtcgcgtgaaatatacttgcacataaccaaacaatgatataaactaaccttaactgctgcttaatcaagttgaaatgagtcgctagtttgttttaaataaatgattgtcggcttttgactagccggtggtcatttattgtacataagttaaaactatattgaatgaacggtggagggttgcagatgccagataataaaagaatattaacaattagtgagtggtatctggagtgtcagaacatcacgactcaattgaataaaatgagcgaaaaacatggcttaagttatgatcaatttctcgtgttggaacagattgtggaactaggacggaacaccccaggccaaattgcagtcgtatttgggacctccgcaccagcggcttcccgtaaaatcaatacgctacaaagtaaaaagtttattcgcaaaattcgtgatatggaaaatgaccaacggaatgtttggttagaagcaactgaagaaggcctccgcaagtacaaagcgctaaaaaaagatattactaagcatactggcatcaaagcaacggacttggagcacttacggcagataaatcaaacaattatagaataaaaaagggaaagcccatcatctttagatgatgggcttttttaataccaataaggtaaatcgtaatcattttatgcataaattggtataattgtgaaagaatataaaaagttgaacttaaggggtggagaaatggcaacattaatggacgtcgctaagcgggcaaacgtttctaagatgacagtttcgcgggtgattaatcatccggaacaagtaacagatgaattgaaggaattggtgtatgccgcaatgaaggaattggattaccgtcccaatttaattgccaaagccctagtcagcaacagtacccgaatcatcaaattgtgtatcttggaagacatcgacgttaccgaaccatattacatgaatctaatggtcggaattgctaaggcacttgacctacatcagtattcgctgcagttagtaacttggcgtaactttgatatcgggaattgtgatggctacattattacgggattgcgtgaaagtgatgttgcatggattcgcgatctgacaaagccagtcgtcgtttttggggagaatcagtacggttttgattatgtggatacaaataaccagttggggacctaccttgcagcgcaattagcattagagcgtggttatcgccagcttatttatattggaatggcgagtgaagaagcgtttgaaaaatcacgtgaagccggttatttacaattaatgcatgagcagcagcgtcctgttcagttacaccattttaacaaccatagtcatttgaccgaagcctacatcattgaacactgggcgcaattcaaactcgagactgcgtttatttgtgccacggatcgtctggcaattgggattgaacgggggattgcgtcgtgtggtggtcatgtgccgcaagagtttgggattacaggatttgatggggtctttttaaatcaagttgcctctcctaagttgacaacgattaagcagtccatcattgaaatgggccgtgcatgcggagagaatatcctcaagaaaattaatcaggagtggattgagcgaccattgatattcgaaccaaacattgaaatgggcgggacaattcgccccgtgctaaaagaacaatcggaataagcataagaaaactgttaccggtaacatcaggaaaacatttgcaaaagcgctttcaaagtacgacaataaaacttgtaaacagcactgataaaaatttattggaggtcgttatagtgaaaaagatgtggaaaaagctagggttagtttcgttattggctggtgtaacgttaacattggctgcttgtgggagcaagagtgcggatggcggcaatgtgaaaatcacaattctacaaggaaaagtggaatccaacaagcaattcaaagcgattgcgaagaagtatgaaaaagcacatccaaacgtcaagattgaaatcacatcaatcggtggtgggacacagtataatcccgttttgaagacgagaatttcatccgggaatgcacctactatttttagtttagatgggccagcatcggttaaacaattcaagaactacacggctgatttaacggatacaaaagctgctaaggccgctattccaagcacactagatactgttaagtcacaagggaaagtttacggcttgccatttaacattgaaggctatggttttgtttataataaagctgtcttcgaaaaagccggtatcgatccaaagagcttaacgacttacgataaattagaagcagctgttaaaacattaaatgaacaaaaagaacaattaggcattaaaggagtctttgctttacctggtaaggaatcatgggttctttcagatcatttgttgaatgtttatctaagtaaagaatttgatggcaattcacaaaagttgtatacctcaaagaaaatgaagtttgaaaacaatgcagaaatgaaacaaatgattgatttgcaaaaagaatattccgttcaaccagtcatgcaaatggattacgcgggacaagtgaaccaaaactttgctcaaggaaaagttgcgatgattcaacaaggcgactggatttacgaaaccgttaaccaaattgatgcgaaattcgctcaagacgggatcggcatgattccaatgccagttaaggaacaacaaggtaagatgcctgttgggacctcaatctactgggcagttaataaacggaagagtaccgacgaacaaaaagcagctaaggacttcttgaactggctatatacgtctaaagaaggtaaaaaagacgttgttgagaaattacatttcgtacctgcttataaaggttacggtgatgtgaagatgccagatgcactcacacaatcggtctatgattacagtcaaaagaaagcaacattcggctgggttttcccgggttatactggcacatcatgggatccagacgttgcccaacctaacctacaaaaatatctatcaggtgaccaagattggcaaaagactgtttcaaatatgaaggacggttggacaaaacaacaaactaaataaatttattcaattggataaaacaaaaagagggtattgaaatgaaaaataagagtttatcattttggttatttttaacccctacccttgttgcattagcattagtcgttttcattccaatgctggagggcctattctattcattcactgactgggatggactctcttttactaaggtcgttgggtttaaaaactacatggccttattacaagataaagcattcggaaacgccttttggttcacggtagcttttgttatcgtgaccgtcatcttgctaaatgtaattggcttggggttagcattacttgtgacacagaaatttaaaggcaacaatttcttacgagcgatcttctttatgccaaacatgattggtgggttaatcttaggatttatctggcaattcattttcacgcaaggctttagcgctttgggatctgccttacacatgactgccttccaaaactggttaacgaattcactaaccggtttttggggcttggtaattgtgacggtttggcaaatgagtggttacatcatgattatctatattgcttacttgcaaaatattccaagtgaagtgattgaagctgctgaaattgatggtgcatctgcttggcaacgatttacgcggattacattcccaatgatcgcgccagcatttaccgtctgtatgtttttaactctgtcgaatgggtttaaaatctacgatcaaaacttgtcgttgaccaacgggggaccttacaactcgacccaaatgttggcgatggatattgtgaatacagcctataattcgagtgatttcgcactcgctgaagctaaagcaatggtcttcttcttgattgtcgctgcgatttctttagtacaagtcttttataaccgtaaacgggagggcgatttctaatgaataagaaaagaaatagttggatcggcgtcctcggtgtattgattggtcttttatggttattcccattctatatgattctaacgaactcatttaaaacaccaaaaggcatttttgcctcagtattgtcgctgcctaatccattcacgaatgtgaactatggagattcgtttaaagcattgaatttcattagttcattgaccaattcgctcattattacagtctgcagtgtgttgctgattatcctctgttcttcaatggcagcctatgcactgcaacggaataaatcgaagttgagtagtagtttattgctgcttttcatctcagcgatgttgattccattccaatcagttatgattccgttgacggcaaacttcggtaatgtgcatctgttgaatatgtacggcttgatgttcatgtatttaggcttcaactgtagtttatcgattttcctatatcaaggcaccctttcaagtattccgattgcaatggatgaggcggctgaaatggaaggtgccagtcggtggcaaatttattacaagatcatcttaccaatgttgagtccaatgactgtgacggtcgctattttgaacatcattgcgatctggaacgattatcttttaccatcattggtcttaccacaagcgcaatatacgattccactacaaatgtttaatttcttcggagaatacacgaaacaatggcacctcgcattagccggcattaccttgtcgattattccggtcattgtcttctacttattcgctcaaaaatggattatcaaaggtgttacagatggcgccgttaaataattaaggaagtgttaatcgtgaaaaagcacagcgaaacaagacaaacgttattggcagccgggaattggttatggtcgctttttaccatcaaccttgcttggtttggaattaattttcctgtcattctgacactgattttaatgtttagtatgccaaacggccgagtaatgattccgggtgcagttgtgctagtgttaatgctcagtttgtttacactaccaagtttagtcgcggtttttagagcggtggaccaatggcaagttaacggtgatggtaattatgcacgcgttgtgttaaaagggtggcggcaggcactgccagactttttagtgaatctgacgttagcgacggcattgatgatcatcgtgttgttactaaaagccagtgtaggcgatattttagttcgtagcggcttattggtctggtttggggcgttattgctagttgtcgttgccagaagctacttggtcgggttagcgcgccatgatgttaccttaggcggctttatcattgccaatgggggcaaattagtgctagccaccggcgttttcatcttgttgatgggcattaatgtctttttaaaactcgcgtttatgattcttgttgcgagcgtttcgttggcagccttcattagctatcaattattgaacggtgcaccagttaaaaacgaagtaagggagaaatgatcgatggtcgaaattaatttaaatcatatcaataaaaaatattcaggaaatgataccaattctgtcacagatttcaatttgaaaattgcagacggtgaattcatcgtatttgttggaccatcaggctgtggtaaatcgacaactttacgaatgattgcaggtttagaagatatctctgatggggaatttaaaatgggcgaccgagtgatgaacaaggttgcacctaaggatcgagatatctcgatggttttccaaaactatgcgctctatccccatatgacagtcttcgataacatggcgtttggccttaatattcgtaagaatgataagcaagataccaaaaaacgggttgatgccgcagcagaaatcttaggtttatcggagtatttagatcggaagccatcttctctttctggtgggcaacggcaacgagtagctttaggacgagcaattgttcgtgatgctaagttgttcttattggatgaaccattatcgaacttggatgccaagttacgggtgcaaatgcggactgaaattgcgcaattacatcaacgtttaggtcgtaatttcatctatgtgacgcatgatcaagttgaagcgatgacgatggctgatcggattgtcatcatgaacgatggtaaaatccagcaagtcggcaagccaactgaactctataatcatccggttaataagtttgtggcaggctttatcggttcaccagcaacgaatttcttcacggtaaccttaactaatgggcatctagtgaatgacgatggtctaaatatcgcagtgccagaaggtcagttgaaacagcttattgccggtggttacgatggtcaacaagtgatcttggggattcggccggaagatattcacgctgaagaaattgccctccaaacattcccagatgctaaaataacggcagaggttgtcgtttccgagttattaggggctaacacaatgctctactcaaagattggacaaaccgattttatcgctgaagttaattcgcgggattatcatgaacctggtgatcgggttgagatggcgcttgaaatgtctaaagcgcactacttcgacatcgcaacggaagaaacaatctattaagcgctgctaaataggcggaataattttggctgacgtatcggagggaacgaaatggagagaatttttgaagtcgatccgtggcagattgtcacgcatcaactagatcgtaaacataaacggctacaagagagtatgacgagtatcggtaatggttacatggggatgcgcggcgtattcgaagaggattattcaggagacagcctgcctggcatttatctcggtggtgtctggtatccggataaaaccgtcgttggctggtggaaaaatggttatcctgactattttgggaaagtgatcaatgccatcaatttcatcaaaacgaatcttaaaattgatggtcaagcggtggatttaggcaaagatgaagtgaccgcatttaaattggcactcgacatgcataatggggtgttaacccgccaattcatcgttactaaaaataataaacaagtgcaagttacgatagagcggtttgttagtatcgttcaaaaggaattatgcgcattgcgctacactgttgaaaacttggcgagcgaagcagttgagattgagattagttctatgatcgatgctgatgttcaaaatgaggatgcgaattacggtgagcaattctggcaagtgattgagcagtcagacgctgcggatgacacttatttggtcggaaaaacaatgcccaacgatttcggggtaccacggtttagtgtgggggttcaaattgatcatcaaacgacaatgatggcagatactgggcttcaagaagcccaccaagttgggcaacgttttaaacagcaattggcccctaaaacgcaattgaattttgaaaaacgagcggtagtggtgacttctcgagattattcagagttggacttggtaccaaatatgcaacgtatcaagcaggtcgttgcgcaacaaagttaccagcaattattagcggcacagacgaatcaatgggcgaaacggtggcagatggcggacgtggtgattgtcggtgatgatagtgcccaacaggggattcgctttaatttatttcaacttttttcaaccttttatggtgaagatgagcgtctaaatatcggtcctaaaggattcactggcgaaaaatacggtggtgcaacttactgggacacggaaggttttgcaatgccgctttatctctcattggctgatccgaaagtgtcgttgaatctattgaagtatcggcataatcaattgtcgggtgcagaacacaatgcccggcaacaggggttaaaaggcgcgctctatccaatggtgacctttaatgggattgagaaccataatgaatgggaaattacatttgaagaaatccatcgcaatggcacaatcgcctatgcaatttataactacacacgttacaccggcgatgagacttatttgctcaatgaaggtatcgaagtgttaactgagattgcacgcttttgggcagaccgtgtccatttctcacaacgtgcgcagcggtatatgatccacggtgtgacagggcctaatgaatatgaaaacaatattaacaataactggtatacgaatttattggcgcaatggacgcttagttatacgattgaaacgctcaaaaaagtaagcgataccaaaaaagcggatctgagactttcagatgaagaactctcacaatggcaagcgattattgaaaaaatgtacctgccacaagatgaacaactcgggatctttcttcaacaagatggctttttagataaagatatccagcctgtcagtgcaatcccagcagatcaacggcccatcaaccaacattggtcatgggataagattttgcgttcgccgtacattaaacaagccgatgttctacaaggcatttggtattttatggatcgtttttcagctgctgaaaagaagcgtaattttgatttctatgaaacgttgacggttcatgaatcaagtttatcagcggcggtccatgcgattctagcggctgatctgcattacgaagataaagcggtggaaatgtacgcgcggacggcacgcctggatctcgataattacaataatgataccgatgacggattgcacattacgtcgatgacggggagttggttagcgattgtgcaaggttttgcaggcatgcgaattagcgatgaaggacaattatcattcaaaccatttctacccaaaaaatggacggcttatgaattccatattaacttccgcggccggttgttgaaaattagcgtgacggccgaccgaactgatatcaaactactcaagggcgatcgtttggcaattcaagtcaatgatgcgtcgatgatgttggaataggaggttattatggacggtgtcttattcgatttagatggggttattacggatacagcccgatttcattttgcggcgtggcgtcaattggcgcaacaagcgtttggcgtcagcttaccagatagctttgaagctgagttaaaagggattagtcgggaagcatccttgcaacgaattgtggcctttgcccaacttgatggccagtatacggtggcacaactcgcagcactggcgactcaaaaaaatgaaaattacgtggctgctatcaagcaattaacggctgccgatattttaccgggtattcaaccgttgttagtagcattaaaagcgcgcggggtgccaatggtcattgcttctgctagcaaaaatgcgccactcattcttgatcgattagctttatcagcatattttacagcgattgttaatccgaatgacgtgcaccaaggtaaaccagccccggatatcttcatcgcagctgctcagaagattgctgttaatccgcgaaaatgcgttggattagaagattcagtagctggtgtggccgccattaatgctgcaggcgctgtttcggttgcgattggtcatgcgagcgaattatcagcagcggcggttgttgtccctacaacggcggcgttaacggctgatttgttagaacaagcctttgaacagtatcaacactaattaatcagtgcaaccgagccttcgggtgtgtgttggactggtttttttaaggaggagacaaatggatttagcagcgatttatcatcgaccagatagtgagtttgctttcttatatcagccagataggctacgggtacgattgcggacggcaagtaatgacgttgaagcagtgtacctagtgtatggggatccttatatattagtcgatggcagttggcaaccgaaaacgattcggatgcagcaaggcttaataacggatctcgcttgtttttggacgattgaactgaccattgatcgccgccgattagcctatgcttttcaagtgattggtgtggacgggaccagcactttttatggtgatcaggggcctggtccaatcttacctaaaacagatgcttgttttcggatgccctatttccaagaaattgatcgggctaaggtaccagagtgggtcaaacaaacggtttggtatcaggtttttcctgaacgatttgcaaatggtgatccgacaaatgatccagatggaacattaccgtggacaaatgaggcaccacaggctcaagatttctatggcggtgatttacaaggggttattgaccatttagatcatttggtggcgttagggattaatggattgtatctcaatccaattttcatggcgccttcaaatcataaatatgatacgcgtgattatcggatggttgatccacattttggcaatgacgagacgctacggcagctgattactgcttgtcatcaaagagggattaaggtcatgctagatgctgtcttcaaccatctcggcgatcaatcaccacaatggcaagatgtgattcaaaatggcgcggcttcaaggtatgctgattggttccatattcgggattttccagtgcgttatcagccaggtcggaatttcgaagatgctacagacattacatatgatgtctttgccacgacgccacacatgccaaaattaaatacggctaatccagaggtgcaagcttatttgttatcgatagcgcggtattggatcgaagcatttgatattgatgcttggcggttagatgtcgccaatgaagttgatcatcacttttggaaaaagttccgacaggtgtgtgatgctgctaaacctgatttctatattcttggtgaaatttggcattcagcgcagagttggctcagcggtgacgagtttagtgcagtcatgaattacgcctacactgatgcgattttggattattttattcataaaaaaattccgctccaccaaatggtttcgaagctgaatcgacagttaatgctgtaccgggatcaaattaatcaggtgcagtttaatatcctagattcgcacgatacgccgcggttgctaacgatggccaatgacaatcgacgcttgatgcgtcaaacgatggcttttatgtatctacagccgggtgtgccatgcctctattatggagatgagtatggcatgacgggagtggacgatcctgctaatcgtaaatgcatggtgtgggatcccgtggaccaagatcaagccatgtatcagttcgttaagcagctaattgggcttcgccatggtaagcaaaaactattgtcggaaggacagcttgagtggttaattgagccgactcatcccgacgtcttaaaaatgactcggcgattaggtgagcaacaattgacggctgtttttaatgcaggtcaaacagccgttagtgttgcatcaatgaggacaccaattctgtctgaaggggttcagcagcaaacagcagcgaccatcattgaaccagatggctttatgatttattaacatttccaaggcaataaaaaaagattcgctccatatgggcgaatcttttttagttaggctgctcgttttctttggaattttgcaaccagtggtaaaatcacgccgaggcccattaaggcgactgagacgacgatgtttaagattaattcatgtgtatatttggctgtgccaggtgtggcatcttgtgggaagatactgaagatcgttcctaatgctgtaatggctaaacaccagaagccaacgatgatggcccatggtttgtttttaatgtatgtgtattctgatgggaatttttcactattgaaacggacccgtaagaaggcgacaaagatgaaacaagttacaaatggtgagacgataccgttaatatttaacaaccaattgaagatgtcgttaatctcgggcagaaaggcactagatgctaaaacaaaggcacaaatcccagtggtcaaccagtaaccgttgattggaaggccttgtttattggtcttagtcagtgcttttggtaagaattgtttggcagtgtcggataagaaaatccgtgtgccgccatcgagtagcatcgctaattgagcgcccatgtaaatcgcttgggtaacagcgaagatgtagagtaagactttacccatgtggaattgttgcccaagggctaagaaggcgtagtatgaaccgttcatcttcaagtcagctggtaagtggttggcatcgaagaagacgccgattgctaatgagccgaagatggttaggaaggcggtcattagagcgagggccatcatggcttttggaaaatcttttttaccatctttcatttggccaacgtatggtgcaacaagttcggcaccgttcatggcgaaaattaagaggccgatggttgagaagtaatgtaaatcaaattttggaatgaaggtgtgtgcgtttaatggatgggtggcaacgtgaccaccgttcaataaaccaacaaaggtcattaggacaaagaggatggtcatgacaaacatcgcccccccaccaacgatactgagtacctgtagagacgatgtaaacttgtgttggaagaagatgaagaggatggtaattgcggctgttaaaagcgcaaaggaagcccgtgagagcttgtcttcaagatttccgttcccagtaataatccaaaagaaggaaacgaccattgaattagcaacatcgaccaagtatggcaaactcgctacccagtaacaccaagcggttaagtaaccccaaacatcaccgcttgtatggcgcatccaactggaaagaccgccaccgtctttactgaaagcagagcctaagtgaccaaccattaattcataagggaggacataggcgaatagtaagacaatccatgagaagacaactgccatcccttggttttgaaagttataaataatatcgtcaaatccaatgacggtcacaaaatccattaaagcaaggacttgccaggtaatatatttcttttttggttctatttcatccatcgtaaagaaaccccttttctgaaaattcacaatgtttttattataatcaaatcagaaagggaagacaaaacttttttgactgtttcacattgatttttaaagaacgggggaataatcttacaaaattgttattttagcccgttaaaatgtcatctaaaaagcgcgcatgccgttttaatctcttgtaagatagaattatcataaaatctggaggcattattaatggacacaccaacagtcgttagcgtcaaagacgttaaaaaaacatacggtaaaccaaacgaaaaacaatacacagccttaaaaggcgttacttttgatgtgaaacagggcgaatttgtcgggatcatgggggcttctggttcagggaaaaccaccttattgaacattttatcaacccttgacaaaccgactgctggccaagttgaaattaacgggcaagcaattaatgggttgaaagggaatgaattagctgattttcgtgccaaggaaattgggttcatgttccaagacttcaacttattagaaaacttaacggcctatgaaaatatggcattaccattgacgttacaaaatgttggcggtaaaaaagtccgcgatttagtcacatcaatcgccaagacgttatcaatcgatagtttattaaacaaatatccaaccgaattatcaggtggtcaaaaacaacgggtcgccgctgcgcgggctttagtccacaatccagctattttattcggagacgaaccaacgggtgcacttgattcaaagagtgccaaggaattattggatacaatggctcagctgaacgaagaacaacgcgtttcaatcttattggtaacgcatgatccattttcagctagttattgtcaacgaatcttgtttattaaagatggtcaaatcggccaagaactcgttcacggcgataagagtcgggaagccttttatcaagaaattttagatacattaggcacatttaaccattaggaggaagtctaaatatgttattgaagttatcattaaccggcattaaaggccgtttgaaagactatttagtgcttttttccggtctaattatggcaagtgccattttttacatgttcgaagcactggcaactaacaaaagtttcgttacgagtaactcgccaattagcatggcgggcattattttccaaatcgggtctgttttattagggattatcacattagtctacattatttatgcgaataatttcttaatgagcatgcggcgtcgagattacgggatgtttatgatgctcggcgcaaaaggccgcaaaattgcccaactaattgctgctgaaacattagtgattgggacagctgctactctcattggaacggcgctcggggtcggattaacccaaattgttagcaatctgttattgtctcaaatggatattcagattaagcatttttcaccattttacttacctgcagtgttagtaactttgattttcttcattatcttgttcattattgcagcggtagttaatcaattccaacttttgaaaacaccagttttacaactcttacacgatgatcaacaaccaaatcgcgtttcacaaaataaattaagccgtattgtgcaaattgtcttgggcttacttttcttagctgttggttactatatgatgattaaagtcgcaacgttccaaattatgggcttagttgtggcattagtgacaattgtgctcgggacgtacttcttgtttaatgcccttttcggctggttgattacgttgctcaaacgtaacagcaagattcgtaatcgtggtttaaataattttacgttagcgcaattgagcttccgcattaaggattacaccaagatgctcgcattggtggcgatgttatttgcattggcactaggcgcaatcacagttgggattggctatcaaagtgaaattccagaaatggcagaaacaatggcgccttacgacgttgttttaaatcaaccgaaccaagaagcattgcgcctcacaaaagatttaaagggtgtgaaggcgactgctaattacgatgttaaagaagatgcgaaaactgtctactatcggacagcacaacttgaaaagtcaccaatcatggccattcagtttggtaatgggaatggtgtcgcccgcgcaaaaggggttaaaccggtgaaactcagtgagattcaaaacggcgattcttcatccttgcgcgcaattcaagtgccaagtcaatctagtaaggacgttaaagtcgtctctgacgctgaatttaatcaagtggcaggcgcaaccacgcaagttaaaacatatcgggtcaaagactttgcggttaatttacccgttatcaaaaaaattcacgcacaacaagtgattgcaaatcctgaattggctaaaggtcaaggggctacaatggatagtagcaagtatgctaactataagctagcgaacagcatgttcagtgggctcgaatttatgggcttcttcctcgggattgcattcttagcgatgttagcaagttgcttgatgttcaagattttatctggggcagctagtgatgttaaacgctacacaatgttggctaaaatcgggacgcgtcacaatctattgcaacaatccattgccaaagaaattggggtcttattcctcttaccaggtatcgtcggcgtcatccatgtcctctttggtcttcaattgttcaaattgattatgattgatccatataatgatctctggattccattttcaattttcattattctctacgcaatctactacttgctcactacatggctctacaaaggaattgtgttgaaggaagttaaatagtagatggttgaaacagtttaaaacataggaatcagtctaaaaaagccccctttaatctgaacttcgagattaaagggggctttttttagatgaggtcgaagttgtttctctagacgctacttgttacactgatgtcattaagaggcgtataccacgctggattagtttttaacttgcttagctacaattgtggtgagcattttacctacaaaaaaagccaaagaagactgccgaaactgtcatttgaagcgcgtattattattgaacggcatgaattattacctacaaaaaaagctgaacaatcagaataatattgcccagctctatattcaatgaatattcatacatcaattatcgttttgatactattgaagggttaattgattgtaactttcaacagtaacgccttcgtctgttaaaataactttagtaatactaccgttcattggactaacggtaacatcgaattggtcgttaccaaacttgccaacaatactgcgaatggttgtgccatgactgaccatcaagactttatcaccgtcagaacattcagcacgaagttgtttgaaacctttaccgacgcgggcccaatattcagcggcatcttcagcatcgtggaagggatcagcttctttcatgaaatctttagaggcatcgagtgagtatttggtgatgatttcttggaaggttttggcatcatgactggcacctgccatggaccacgctttgggtgaatcttcaccttcaaaatagccgtagaattcttcgcggaagtgcggtgtgatagcatatggagtatcaaggtagaaattcttatggagaataattttagcggtgtccattgcgcgactgcggtcactagaataagcttgagcaaaattaactttcgctaattctttgccagcgcgttcggcatctgcaatccctttcggagtaagtggtgagtctgaccaaccttgcatccggttataacggttaaagaatgtttgaccgtgacgcactaaataaagtgtgattcgtttcatatcgtaaccctccaacaatagcttttagtaccttcattctagcatagataaaaatggtgtgcagggtcattccatattttttgcaaaacggttacatacatttatagtttttaatggtaataataacaattgatttataatcaattgcaattatcattaatagagaataaattttaaaagatactaataaataactttatcaatatttattaatattttaagcataaaccttttgattttatacattttgtgttatttttgactagtaacacttaataaccacatttagtgtttatgtaaaggagtggttcgatgcaaccagaaacggatagtaaccttgttgatcgattcaacgaatggtatctgcaaattggccaaatttacaataagataaatcatttaactgtcacgcacgacttgacatacgatcaatttttgattctcagagaggtcaaattaaaccccaatattgaagtggcgaaattatcggaatcctttgatctttcaggcccagcaatttcacgtaaaattaatgttttattcagaaaacacttaattgttaaaaatcgcagtgatgaaatggaccaacgtaaagtattcatttcattgaatgagcaaggattacgaatggttgatcaattggaagtcgatttctacttattctttaaacattttaaagatgacggcaatgcagacctttctcaattattcgcacaaacaaaccacttattcgatacaatggataaatgggaacctaattcagatattattgattaggtcaaaaaaagccgcgcacaaatttaaatttgtgcgcggctttttttatttaatcgttaaagttgccattttctacgtctttgatgaaagtcttcaagtgatcgaagtaaacgggtgcgttatcaatcatgtgatggtgaccaccatttggcgttgtcactaagcgagcatggggaatcttttcagccatgatcttagcggttgcgattggcatggtttcgtgttcaccaaatgtgattaacgttgggacagtaatcttgtggagttggtcacggaaatgccaatcctttaatttcccagtcacaacgaattcattatcaccttggaagacgccataaacgtcggttgccattgttgggattaaatgtgagattgcaagtggttgtttgcgatcaacgtaaccagcgtttaacttgtcaacaagtgcttggtattcatcgttgtcgtaatcattcttagcttcacagtcttgcatgaatttcaattgttcaggggtcatgatgtcttcacgaattttgttgatgtttgtgacatattcgtcaatttcatcgaccatactcgagatgatggcaccttttaagtgttggccatatttagcagcgtacatttggaccaatgcgccaccccatgattggccgattaagtagaagttgtcgatgcccagtttttgacggacttcttcaacttcatctaagaagtaatcatatgttaataattggtcattgcctggttgtgagtaatcaggttgatcagaataaaatgaaccaagttggtcgtacatgtgtacttgtacaccaagatcagctaattccttaccgaagttttcccagtattcgtgattaccaccagggccaccgtgtaagcagagtaaatgaatgtcgcctgttccttgcgtattagtccataaatggtaaccattatccaatgtgaggattgttgttccttgtttcatatctgcaccatcctttaattatgatagtttcattataaacctattagagagaatgtgcgagggtcaacatgatttagttgagcgtttctaattggcgtcgaatggcaggaacagcctgtttattccccgttagaatgaggtgatcattgagatggatttgcgtgtcaccatgcggcatgatcagttgcttatcgcggtaaattcgactaattgtgacttggtccacaaatgggagattagaaagttgaatcccggtgaagcgccgatttttaaccgtgacttcgaagagcccggcatcagtgttatcaatgatttgtaaggtagatggagtctcgattaaacttcgcaacagactgatatttgcttcgtaagtgttaaaaatttcaacgccatgttctttaagttcatcgtattgatcgtccgagatattcttaaattcaaagcgggcgatgatccgcggtactttggcctgaatcgcttgttgggcaagttgataattttgctcattatttaaatagcctaagaccaggatatctgtatcgaagacggccgcgtcagttaaggtggctggtgccaagtcaggcaagagttcgaggttggcttggctatggtagatttgataattttgttcgttattggtaaataattcgcttgtgtacagacctttggataactgttgggcgattggaattgtcatgatgttggcgccgatgaagttaacacgtttgcgtggcatctcttcaggcgttggtaagtagaatcgattgaacagaatcggaccaagaatacagctaatcaccgctgcaattgtgaaagcgccggattgctgtgtcgtgataaccttcaagttgagaccgaccgtcaaaatgggtaagaccaacgtgatggtcgtcgaactgaggaaagtcccggcgagggcgttggtgactttgaagcgccgttttaagacgaagtaaatcaaaactttggcgcccatgaaactgatgaagaaaaagggaatcagggtcagtgatttaggatcacgtaagagcgcggggatgttgagttttgcaccggtcataatgaagaagatgggaatgaaaaagccgtagccgattgatgttaatttatcttgcgtctcttcacgggggcgtaaaagtttcatgaccatgccggctaagaaagcgcccaaaatactttcggcaccgacttcttcggcaatcgatacaagtgtgatgattaagaaaaaggctaaacgaatatcgagttgagtcgttgacttatcaatccgctcaaagaagtgataaacagttttaaaacgcatcaataagaagatcgcggctaagaaaattagtgatagtaaccacagactcttagaaccaggattattgagggcggcataaattgttaacgaaatcagcgggacgatttccccgaggacggcaattaacagaattgtttggccaagcggctggctgaggagttctttttctttcaacgcggcgatgacgacccctaacgcgatggttgaaaagagaattgttgcgagtccaatatcggtgaacaacccactccatgccaataaactggcgagtcctagcgaacttaataggatcagcgtaaaactaccgactgccagttgtaagggcgtcagcggtgttttaacgccagatttagctgtggtgggttgctttttaaagagttcaaagtcgatttccatcccgcttaagaaaattaagacggtcacacccaatgatgaaagttccgtcagtgtgggggtggttgagatgaggtggaagccactttgtccgagtaaaatcccgaccaaaatttccgcaacggcggttggtaaataagaaatcttaaattttgccatgagtaacggcgtcattaaagccgccaatagaacgattacgagcgctaagcttgtcataaaaaagatcctttcaatgctcaataaagttgtgtagagcatacactaacctactaaagcatgtcaaagccgaatagcttccgagcaacagcacgggttcgtaaataggcggtgtagccgactgtttgcgggccacagctgtgcacaggaagttggctttgatagctagatgggtactaaagcatgtcaaagccgaatagcttccgagcaacagcacgggttcgtaaaattggctttttatatattggcgctaatattatcgattttgttgataattcgttagtgattaaattattattaaaaagttggcattatcgctagttaatatctacaactaatttacaattggtaataacttctgtaaaatagatgctacgatattaaaaaggggggcgatctaaaatgaagataaaagaaagtctcgcggttggaatttttgccttttttggcgggattttacgctatgcaattgggctcggattgcaccaagcagcggggtttccgtatggcactttgtgtgtgaatttaatcggggcgttttgtcttccttttttaatgcgttacatcgtggttcgttatcagattagcgatacgctggcacttgcaatgggcacgggctttttcggagccttcacgactttttctagttttagcgtggatgcattgaagttattggtggccaatcaatggtggccatttagcctgtatatcgggattagtttgattggcggtgtctgcttaagtttagtggcagattactgggcagtttggctgctcgatcggcaaggaaagtcgcaggtgctaaaatgatgacgttattaattgtcggattgggcgcggcaatcggcgctattttgcggtatcaattaacccgtcttggaacgcagattgccagcgaatatccattaatcacctttttaattaatttaacggggagcttttgcttaggttgggtgaccggggcacaattggatcaaacgtggacgccctttttgggcgtcggggtcttgggtggctacacgactttctcaacgttcaatagcgaattgagtcagctgtggtttcgccgccgttaccatattttctttggttatctgctattaacctacgggttagggctggtggttgcagcggccggcttttttgtaggaagatcgtgaaacgtgctttagcaaataactttttccgcttagctacatcaggaaaacaatcgactacatcgcttatttccctgattaggctaatgctcgaaagttaaaccgtttcaaacgcactctaaacgtgctccgataggcatatttctacgcttaaccaaatttaccgaaccgacgattgcatcgccaattcggtaaatccagttaatgctcaaaatataagcgcctatcgtcgcactcttgtgaatttagtgttaaacttgtagaactgtttatttagaaatcgggggacatctgctttgactgacgaacaaaaatcattagaacaacgccgtttaaccgagattgtcggtttaattaaaaacgccgaaaagcacttcgaaggcgccgttgaacgggctaaatcagaagaaaaagaaattaacgcaaacttctttaatgatgtacggttgaatttcaataatgattcagcaatgactgaaacggcagtctcaatcgaacaacaacggcaaatgttgcaagaacggaataattcttggcaacaatcttcccggcaacttgagactttacaaaaaatggaaaaaaccccttatttcgcgcggattgattttaaagaaaagggtgaaccaaagtctgagtccatttatattgggctagggtcattcaccgatcgcgaagatcatttcttgatttatgactggcgggcacctatttcatcaatttactatgaagggaagactggtgaagttacgtaccaaacgcctgacggcccgcaagacgtcaatatttctttgaaacgtcaattcttaattgaagatggccaaattaaggcgttatttgatacgcaagaaacaattggtgaccaaatgttactggaagtattgggcgaaaagtctgatacacaaatgaagagtatcgtgacgaccattcaacgggaacaaaatcaaatcatccggaacactgacgcggacttattgttcgtgcaaggggccgctggttctgggaaaacatccgcgattttacaacggattgccttcctactttaccggtatcggggtaacctggattccagtcaagtgatcatgttctcgccgaaccaattgttcaacgattatatcgctgacgtgttgcctgaacttggcgaacaaaacatgattcaaatgacttactatcaatatgttgcacggcgtttgccgaaccttgctgttcagagtttatttgaccaattcgaaacaccaatcacggaaactgatgcgcggattagccgtttgaaagaaagcctagtcttctataaagcagttaaacgttacgcagcgcatcttgaaaaaggtgatatgcgcttccgtgacttgaaagtgaacgggaaggtcttgattagtaaggaaaaaatcagcgacgtctattaccgtttcaacgaaaactatcacttaggaaaccggctagacgcgacgaaggaaagtttattgcgcagtttgagccacaaagtcgaccatgaaacgaaggctgactgggtgacagaacgcgctgaaaacttaagtgatgaggaactccgcgaaattatggcgggtaaggactttaagactggtgaagcggaaagtaaatatatcgctaagcaaatcgttttgaaggctttcaaacccgttcaaaaaggaattcaacgcaatcgcttcttgagtattcaagcacaatacgtccacttcatgcgggttgtgccgcaattggttgatttggctgaatttgatctgacaccagaaatctggaatgatcatgtgactgattttgtcgctaatttaaaggccaaacaaatgacgttatcagatgtgacaccttacttgcatctttatgatttaatgaccggtaagcacggcgaacgcgacatgcgctttgtctttatcgatgaaatccaagattacacaccatacgaattggccttcttgaagatgcacttccctaaggcgcgcttcacgttactcggtgatttgaaccaagcgattttcaccaaagaaaacagcacgaacctattacaacaagtgcaacaactctttgatgcgcaaaatacgaaggtcgttcaattgacgcgttcatatcggtcaactgaacaagtcaccgactttaccaaagggctcttaaagggcggtcaaaaaattgaagctttcaaccgtgaaggcgacaagccaaacttgattgtgcgtcaaagcgaagatcaattggtcgctgatgtgaatgcgcaactcgctaaaaatgaagcagataagttaacgacggcgattatcaccaagacattggtgcaagcccaagaactaacagctaagttgaaagccagtggcacaaaagtcactttaattcgttccgaaaatcaacgtttggcagcgggtacgttagtcgttccaagtttcttagccaaagggttggaattcgatgcgattatcggctggcaagtcagtgcaaccaactacaatcatgaagatcaacggcaattgctctacacgatctgttcgagagcgatgcatcgcctcactttattagcaacaggtggcatgtcaccattgattgataatgtggatgcggatgattacacgttaattaaatacacatttggtttatcgaaactttgttcagttttcaaagatctactgtgttgaaacagcttaattaatatatcatttctaacgaacactgtcaagcgatttttataaatattttctgaatatttattcaatctcgtttgacccgttatttcgttagcgatgagcttttctctcgctgacaacatagaatactataccaacatctaaatctatcgtcaagtaaaatttgcataaaattcatcttttttctaaatattcaaacaacttagttatttgcaagctttgcttggcattctggacagataccatgcacttccattcggtgcccagttaccataaaccccgttagattctcagcaatcacttctacatcatctaactccggataaaaaacatcaactacttttccacagttctcacaaatagcgtgataatgcttggtctgcgcaaaatcaaaatgactggatgcatctccataagccatttcttcaataatccctaatgaggtaaacagacgcaagttattatagattgtcgcaacactcatattcggaaagcgccctgctagcgccttatagacatcgtctgcagtcggatgcatatgagtgccaatcatgaattccaaaacagcttgccgctgtggcgtgatccgtacgttgtgttctttgagtttccgtaacgtttgttgcacgatgtgactcattttgccaccacctttcgctaatgataatcattatcatatatccttattgctgtaatcgtacctttttttgacgagactgacaagtatctttgctcaaaaaaagacgttacgcgagtcccgtaacgtctttacatactttacttcaattcaggtgcatccgtctcataaaggtccattgttgacttaccattattttgctggataacactcgttttattgttactgtctttcaacttagctttagcatctttcaccttgtagctaatcttagacttatctggtttttcgaatccttgtggtgtatagaatcgaagtagatcgccggtgattaccttgtcagaaagtgacaattcttccgttacatgttcactgattgccgttaattgcttcttctgcgctgccgttaaattcgtcagcgtcttcccattattcgtatcgtaataggtgctgcctaccttcgtatactgtggtgtgacaaagtccccatttctaaagacaaccgtctgattgcggttaggcgcaagtaaatccgaaccaaattggatggtatcgtcattttttacacctaataggttcaataaagttggtaaaacgtcaatttcaccaccataggtatggttaacgccaccttttaacccatccatatgcaccatgaacggtactttttggaattgcgcattatcaaaatcagtaaatttatcctgattcaataacttcgcaacagccttcttatggttccctgaaatcccataatgatcgccatatagaacgagcatactattcttatctaagccagtcttttgtaaccaagctaagaattcaccaattgattgatccaaatacttagcggtttgcacataaccatcaactgtatcatcaccagtatcggtcttagcaattgattgattttgtttatccaataagtatggatagtgatttgtcacggtgattaatttagcatagaacggttgtggtaattgttcaatgtattgggctgagtcttgcatgaagatcttatctttcaagccataacccacgttgtagcctttaccttctttaaagtattgagaactgaagaagtaatcatagccccatgacttgtaggtattatcccgattccagaaacttggcacatccccatggaatgaagcggttgtgtaaccttgttgatctagaattgatggtgctgcttggaaggtattggttgtcccttgagtgaccatggcggccccttcaggtaacccgaacaatgagttttcgagcattaattcagcatcagccgtcttaccttgaccaacttggttaaagaaattgtcgaaactgagggtgttttggtcgtgatatagcttattgatatttggtgtgacttcttgaccgtcccacttataatcaattaaaaattgttggaaactctctaaatggataacaaagacgttcttacccttagccacgccagtgtattcaacattgggtgcaacccggttgtccttcatatacttcaagacactactcatactactactatcagcattagccttaatcgcattattcttggtcgtcttcacgccatcatagacagtgtatgcattcatcccaagatacttaatgatgtagttgttatcgaacgtccgggttaataacccagaacgatctgcttctgcaatcccgaggttggcaccgaataacacaacagctaacccagtaattgcaaatgcattccgcttcataaagacacggtgatcaatcttcactaacttagtagccaataagatgattagcaataaaacatcagcgaaaactaggaaatcagaatattcaataatcccagcaatactcttgcccaagttatttgataccgcaccagagcccttcattaagttaaacgttaagaagtctgaaaattcacggtaatacaaaatattcgagaataaccaagttgaggttattaaatcaataataatcaacgtaatgtatgactttcggccattcataaacaaggcaatcccaaatagcaataaggttgttggaatgggattaatcgtcattaagaaggcctgcatgccacctttgacgcctaagttaaattttgtttgatatgcgtaaattgttttaagccagaatagcgcaactgcgaaaaggaagaatccccatcgtgtgcttaatcctgattgaattttatgaccaatttgtttcatcgatacagtagcctccgttaaaggtcgttgggctttaaaagccgttgacaatctgaaagttagtttacacatccgtgaaatgaaaagcaatatgtaaccggcttgaatgccaaatattaaaccatttttaataatctgagtcgcaactgagcaaggctatcacctgcttaagtagcaaaaaaaccatcaagtaattcgatactcaatggttaattaactagtctgctaataaatcgtatagttccattgcaactaaatcaatattgtcaaattggaattgttgatgtgtgttgctgtcttcaagttcaaatgcttgagcttgaggatcatagctaacagttgcttttaaatcgccgtccttttcaaaacgtctttcttgaacctcagcgctttgatcttcttgcattgctaccagacgtttgataatcgcaactaactgtgatgattgcatggcgaagcctcctttaataactaactatcagtttatcagaaaaagagcacttctgcaccgtttatatccaattattttgcagaaggccaccataatttaattaaagcttgggtgccatcgtcgcctaattgtttatcattaacgagctgcgcatagagtttcttagcttgaagcgtagctggtaaatggagccccatcttttcggattccgttaatgcaatctttaaatccttcaaaaaatgttttgcgaaaaagcctggtgtatagtcttgcgctagaatacgtggaccatagtttgcaaggctccagttctgagcactcccaccattaaccgtgtttaaaaccgcttctagttctaatccggctgctttagcatacactaacatctctgtcattccggtcattgtgccagcaatcatgatttgattggccatctttgtatgttggcctgtcccggcagcaccgaagcgatggacagtcttacccattgcttcaaaaaagggtaatgccgtttcataggcagcttgatcgccaccgaccataatcgtcaacgtcccgttttgggcgccgatatcgccaccagaaacaggcgcatctaatgcttgcagacctttgtcagctgctgttttggcaattctctgcgccaatgttggcgtgctggtcgtcatatccaccaaaatctgaccaggttgtgcagcactaaaaattccgtcttcaccataatagatggcttcgacatcttgcggataaccgacgattgataacacaatctgactttgcgcgacaaccgctgctggtgaatcagcccatgttgcaccgagtgccacaactgcatccgctttttgttttgtccggttatacacgacaactggatagtctgccttcaataaattcttgaccatgctactacccatgacacctgttccaatgaagccaattgttggttgcatcaaaaacgcctcctactttttatcagttactcgtggtttaactgctaacgccccaatccccatgaacatcccgagatagtacgtaaacaatcgccagagcaacatgcctaacaccagtttacttgaactcgggataaaagtggcaaataacgtcttaaaactatattctgccccaccagaaccgcctggaactggaaagagcgagacaatcatgacaatcatgatgtgtaagaccatcacctctaaataattaacatgcgggatgccaagtgccaataagacaaagtatggcacactataatagaaaaaaagttgcccaagggttaaaatacagcccttgattagtttctttttctcgcgtttaaggtgtagactctccgcgtaaaaggtatcgattttggccattaacattgtccgccattccgtcacccgtttttgggagacgaaccagcccaccggaattaataaccagtgcactaactgtttcgtaaatcgattgtaatacatgattagcaacaatacggctaacacaaccacatgcacgattaatccgaaagtaatcaaaatcgacagcgtcccaaaatgcttggaaacttgcgagagaccaatcatcatacttaataagaaattcaccagtaccatgaattggtaaacaataaacttcatcagcagtactgagctagcttgcccagcttctacacgggattgcatcaacgctaccagttgtgccggttgtccacctgaagaaaacggtgtaatcgcattgaatagttgtgcaatcaacggaatccgaagcgcattgtataaagaaaagtgttctgtgcggtcttttagaaagacgcgtaagacaagtgcttcgaaaaaccacgaaattaacatacataataaggcgaccaacagccaccaaagtttcagatgactaatatcgataaacagctgtttcaacgccagcgtgcgactttcataggcaaaaatcccacacccaatcaacagcatgactgcaaaaacaatcttattcgttctactcataaacgaccctttttcttgttattagcaacgatatgaaaaaactgttgattatatgatcaacagttttccgccagcgcgacttattttttagtatctaaatcttctaattccaataaatcatcttggtctaactttaattcgtcatataatagctgtgattgcttatagaaatgaatcatctgttccgcaaagtaatccgccgaaatagcatgcaacttctttcggcgcggtgctggatcatcaaatgcatgtggatgattcaaataattcgatacttgatggatcatttcatcttcgttcgtaaatgtcgtcccaattgaaggatcagttaataactcagccgcatatggacttgtcatgacgacaatcttgagttcagcggccatcgcttcaatataagttaatccttgtgattcagagtcactggcggagacaaaaagattcgccatatgataataatttgcaacttcatcgttatcaaccattccagtgaaaatcacgtggtcggtcatgtttaacttggcaacctgagcttctaaatcttctcgagctggaccttcaccaacaatcactaacattaaatctggtgtttgggcgactagtttgggtaacgcatcaactaagatatcaatccgtttttcataagcaacgcgactcaatgataagagcacaggttgttctgacgtcaagcccaattcggcccgtatgtcgcgggtcacttcgcgctcaaagcgactaatatcgaccccggtcggaataatccggatgggggccttcacttgatagccatttaaggtttgagaaacccgctctgatggtgccacgatgcctgacatgtgatataaaaaggcctttgtcatttgcttaacatggtatggccgtaataacttcccgtttaaaacatagtgtaaataatcctcgtacatcgtatgatacgtatgtaaacaaggaatttttaaatttttagcgacaaacttcccgatgtagcccatcgaaaattcggtctgggtatgcacgatatcgagatccaattccttagccacttgataagcgtgaaataagccgcgcacagcaattcgccgatccgtaaatgagacaaacgggacactagcaaaccggaaaatattcggttcgactgcatctttgtcaacatgtggatcggtcgttgtaaatatgtagaccgaatgcccttgtttttctagggcttcttttaatgttttaatggaggttgccacaccactgacttgtggaaagtaggtgtccgtaaatatcccaatattcaattggtttcctcctccttatctttggacatttgatttcattataataattacatcgcctagatgcaatcaatgtcactaattgtaatctattcatactagcataaaaaccgtctttagacctaaaaaacagccaatttacgttaaaaaacgggcactgcacagtttttgtgcggcgcccgtttttttattttagcgtaaccaatacgtaattgagaagattattaaacaccaaatcggtaatgccactaacaggccgttgcgaatacccataaaaaatttcatcatcccacctcatttcataaaccaatacgaacagcttgctatttagggtcactgtctactatgataaaggtaagtttaggcttcatttattaagaactaccgtgcttttacttaagaatgattaaaggagcaagcgatgcaaacttatctcattaaaaaacctcaaaaactcgaattaacctatgacgaaaatatcctaacaattcactatcccggactgtttaagaagaaacaaaaccaggatcgtgacattccgtttagcaaattaaaatcagtccgcttttttgaagcgacttatcggcatggtcatctccaaattctctaccaaaaacccaaccacgccctcgaaaaaatcgtcatcagtttcgaacccgacgataacctcgctgtgcgcaagttatacacagccttagcggactatctcgaaaaaccaaccgttgaagaagacctcagttatgttaagaccggtgatcttatcatggcttacctcaaaatgcgcgacgacggcctaatgacccacgaagaattcgaagaaaaaaagaaaagaatactaggaatggaatagagtgcgcagtaagcccggttatcttctgaggattagcttaatcaggcggattgccgacaaagtcggtgatttgactgatgtcgctaaccggaagaagatggcttacggagcacgtttcaaagtagagtgcgacggcagacgattatacgctgaggattagcctaatctcgtgaataagcgacgacgtcgattgtttgcgggacgtagctaaccggaagcggatgtctgtcggagcacgttttaaatcagagtgcgcagtaagcccggttatcttctgcggattagcctaattcaccacaaaaaaaagggccaacgacaaacatgtttgtcgttggccctttttttaatcctcgcgagatactgagctaataaaccactctttatttctttataaaaccaattgccatcccgatgattaagatgaccaacacaataaccgtaatccaaacgtagaggtaatccccttctttagcaaatgcgtagattgataccaccacacgcaagactggcgttaaaatgaggcagaataagcccaacataatcacagcgccagccttaaatgcagcaatgccactgaaaatttcggtaaaggtcgttggaaattgatattctgaataacctgtaccgccatgaataatcgcaagtaacatgccaataatgagcagcgttgctgaaaccgccaccccaatgcgtaaaattttaccgatgacgagttcaatttgagccatctctgcttttttatctgtcattaaatatgcaccccgaatcctttaagcaccatttgtaaacctgtgtataacaaaatggggataaaaatcatgcgaatcacacgtggttgcaaatactgcataatccgtgaacccacagtggaacccaccaaaattccgattgctaacggtgcagcaacgctgggaataatcgcaccgctgaagaaataaacagtggccgaagctgctgccgtaacccccatcatcaaattactcgtggcacttgatggtttcaatggcatcttcataatcgtatccatggcggtcactttgaataccccactcccgataccgagcaagccagaagcaatgccggccccgaacatcatggcaaagccgcctggtacttgttcaacagcgtagtcgacttgttcttggttggccttatcgtagtaagtgccatttaagttcaacttcttggcccacttatcttcaccagcgccgacgtgttgttctgcaactttaccacgtaatttttgaatcatgttgtacgttgaaaatagcaagaatgcgccgaataagatgaataagaatccagttggtacaatgccggtcaataacgccccgataatcgccccgacggtcgttgcgatttctaggaacatcgccactcgtaagttgagcatatcatctttcaaataggcgatagttgcaccagaacttgttgcaatcacggcaataatgctggccccaatcgcgtatttaatatctaggccaatcgctagcgttaatacgggggttacaatgatcccgccaccaatccctaagattgaacccaacacgccggctaaaacaccgacggcaagtaataaaataatttgttgcatctcttttctcctcttaatgcatttttataaccgtttttcgcctgttagtgcacggagttccgttaaatcctgactgacttctaaacagcctaagtattgtccctgtggattacgaaccgcaaaatagcgaatatagacgaacatcccgcggaagttcaaccaaaaatcagcgttgtcttctcgccctgcatgaaagtccgctaaaattttctcaaccttatccacactctttggtggatggcagttcacaactgcgcggccaatcactgcccgggttcttgggaaaatacgatgctcgttatctgagaaccaccgcacaatatcgttttgatcgacaaaggttaaatcaagcggtagtacttggagaatcgccgtcaattcgctgatattcatcgacccagatggtagaacgattttagcttggttatccacgccaatttcgatatggggttgtggtgcttcccgacgtgcttgaaccttcgcttttggtgccgcttctttttcgtcagctaacattgccttcacaaaatctggcatttctggttttccttcatctttttcagcgggggcttttggtacaggttgtccgtgaatttcaaacggaatattagccgctgccgccatcgaagttggtgccggttctggtggcgttgtttggatcgtcatttgcgcatccgccaacgattgcgccatcgcattcagttcttgcgcaatcttcggcacggtccgcttttcgaccgccgcaatagcttcagcacttggttgccatggtaatgggtctggaattaaggtatacccgattggttggctttcagaagcaattagtccccagtcagctggtgtaaagacttcattaaccatcggaatcatgatttcttcttctttgaaaatcatttcttgaatttctttgctcatcttttcaacggctgcttcaattgcatatttatccggaattggttccgcagttaccatttgataggccgtcttcaccaacccccgaatttgatcatccaccccccacatcactttgggtggtgcagtaatcccatattgatccatcaacggaaaaattaagttttctttccgtaaatagtggcggtcgatcaactgtaaatcttttaacgcttgttgcatccgcacgagataattttggtcagtccctgactgctgccatttcttcaaacatggcagtaattcatcatttaagagcgagttcataaccaaattttctaatttcatcacagcgactgggtgtcctggctgttcttgttccggcgtttcagccccatttgaattaatcgcccccttgaaaaccgcagcatggacattacacaaatgttgaatctccatcgggttcaagccactggcaatcaattcccgttcagcagacgtaatttcagacacgtcaaccccagaaaaggactcatcaaaaatccgcttagcctcttcaaacgagccaccttcatgcagcatttttaagatttccacgattcgtttttggcggtacgcactgctatgctgttgctcacacatcagctaacacctcgaatccttgtgcttctagactagcgataatcgtcgtcaaaggaatttgcttcatcttagctcctttaggcaatgtcataaaacgccccgcagtattcaaaagcgctgggttcgtgaccccatcaagcccaatttcaacaagcaccgacaccacttcaggataggccgttaccaattcataaacggtttgacttaatttaatttgttttgccatcataatctccttagtcagcgttatttttcaatccagccaccatcaattggaacgacggtgccatgaatgtaatccgcaacatcactcgccaagtaaacacttaagctcgcaacttcagttggttgtgcccaacgccccgctggtgtctgacgggcaacttcttgtgccatctcaccagtccccgaaaaatcggctgcgttcatcggcgtctcaatcgcacctggggcgatacagttggcgcgaatccccttagcggcgtaatcataatcaagctgctttgtatagccaatgatggcgtgtttcgatgccgtataagccgcaccaccgccaccagcaactagcccagcaatcgaagccatattaacgaataccccacgcttttgcgcaaccattgttggcaagatcgcatttgttacaagatattgactttttaaattcgttgccataattcgatcccactccgcactactggtatcaagcgttggtgcataagcatccaacacgcctgccgtgttgcagaccacatcgattgggccatgttctgccagcaaagtcgctaatgtcattgttaattgcgtttcatcacaaacatcaacctgcgctgtgatgcaccgactatcaacagggacttcaatcggctggcgatcaagtgctaacaccaatgccccctctgctaaaaaagcgtccacttgagcgcacccaattcccgatgccgccccggtaattaaaatggttttagtcgctaaatctgcaaaatgccccattagtcgaccaattgccaatcatcagccaatacatcacacgatgttggttggaacattgagtatgctggtgtttcggttgttttaattaataggtagggactaattgcttgcccctcgaatgtcccatcggccacttggaaaataaataattctggaccatcccagccagtccgtaccacttttttgccagccttaattgcattaatcgcttcatcaaatcccatgatcattacctcatttaacttaattttttaaaatgttgaacaatcaaccttatatgatattctagcacgccactcaaatcggtaccaattaaaatcacaggcaattcgattcaaaaaaaggtgtgaccaatattggtcacaccttcctgaagttaatttgatttgcgtttaaacacacgcttaatcacatcccagacccctagtgattgaactaagcgttctgcgggcacatactcgcgaatggcgcggagtacttttttgggttcctttgaagcaaaagtatacgtcccatttttctttgtttggatagcatagcggggaatccacttgcctttgaacatgactgatgcaatcacatagtcaacttcttcccatggaatttgaataaattgtcgtgcgtcacgatcattgaaaaattcaaaccctctatccccgatcatgatttgtccgtaatcagagagtgctgtaaacgacgtggctttaatcactaagtccacctttgtattaatcgattgaaccataatatcgactccatttccaaaaacttactttcattatacgcttttataaaaaggaggggctaggacaaattgactttgtcctagcccctcctttgttttctaaacgtgcttcagtaggcatattcctgcggttaaccaaatttgccaaatcggcgattgcatcgccaattcgtcaaatccagttaatcctcaaaatataggcgcctgcttatgcactcttttacattaagtgtaatagatggaagacaattccgactacgaataagccaagaataatcacgattggtgagactttcttcttaagtaaccacatacagaataatgttaatcctaatgcagctaacccaggaattaaactatccaagttgtcttgcaacgttgtcactttattgcttgtcaatgacaaaccttgagcttgttgttgtaaggctgattggatacccttagcaccgctaggtaatttatcccagtcgatgaatgcgcctttgtccaacttaacagatgaaacaactggcgtaaacttgacagatacccaacggttaaccaacgaacctaagatgaacatcccaaggattgaagcaccctttgtgatgtcttgcaaaataccaccagataaatcttctgtaatctttgaaccagcacggtagccgaattcttgtgtataccacatgaatgacatccggatagcattccaagcgataaagtaaatgattgggccaagaatgttaccactcatagcaagtgaagcagccaaagcaccgatgattggtttaacagtgaaccagaatacgggatcgccgataccagccaaaggtcccatcatcccaactttaaccccttgaattgtaacatcatcaattggtgcaccattagcacgttcttcttcaagtgccaaagttaccccgatgattggtgaagcaacataaggatgagtattaaagaattccatgtgacgaactaaagcagctgcccggtcttcttttgttttgtataatttcttaattgctgggattaatgagtaagcccaaccaccattttgcatacgttcgtagttccaagaaccttgaaggaaagttgaacgtagccaaacagaaatacgatctttacgcgttaattttaattgttctgccataattgttagcctccttcttagtagttgtcgataatatcgccaagtgggtcaccagtatttgaaccgccgccattacctgagccgccttgttttgaaagggctaagtataatagggcaagtgaaacaccgattgcaccaaggccgataagtgtcaattgtgagatagtagcaagtacgaaaccaattgcgaagaatggccatacttctttagttgccatcatgttgataaccattgcgtaaccaacggcaacgaccatcccaccaccgattgctaaaccgtctgttaaccagattggcattgctgtcaacatttctttaacagggccagcaccgattgctaagattaagcctgcaggaatagcgattcgtaaaccttgcatgataatagcgatatattgccacatttcgatcttacggaagttaccttctttagcagcagcatccatgatgtgcacgataccagttgctaatgtccgtacgatgattgttaataataacccggctacggcaagaggaacagcgatagcgatagctgatgtaacgccggcttttccttggccaccaagtattaaaataattgcagatgcgattgatgccaaagcagcatcgggtgcaacagcggcaccaatgttagcccaacctaaggcgatcatttgtaatgtcccacctaagataagacaaggtagtaattgaccggttacaagaccgattagtgtacaagcaataactggctgatggaaatggaattgatctaagataccttccataccagctagaaatgcgataaaaatgaccaaaatcacttgaatgaaattcaaatccatgattattaatcctccaatttcttctgatgttatttgttattttgtttgtctagttctgcttgtgcttttttaaggatactatccatgttaccgtttgagtcacttggcactttacgaacatcgaacttgatgcccttagcttttagtttttcaaaggtatcaatatcatcttggtcaaaagccaaaacagtatttggttgcactttaccagttgagtgcgccattgaaccaacgttaattgtttctaatggaacgccaccttcaactgctctaagtgcatcttgtggtgattcaaataataacaaagcacgttccttaccaaagtgttggtcatcttttgccaatttaatcatttgatcaactggcacgacgtgtgctttgatgccactaggagcagcttgtttaattaagtttgtccgtaattcatctttagcaacgttatctgaaacaacgataatccgtgttgggttagttgtcttcgaccatgtcgttgcaacttgaccatgtaataaacgtgaatcaattcgtgccaagacatatttgaacttaccaggtgtgcctgagtttgaagtcgtttgtgcggcttctgccttaggtgcttcttctggttgtagttcttcaggtttaacccgtacccctgctttagcttcatcaatgatatgtgctgcgatttcatgagcagatgtcatagataaacgagatgcgtaagcttcaatcaacattggtaagtttaatcctgtaacgattgcccacctatctttatgtgcttcgaacaacccattagcttgattaaatggtgaacctccccaaagatcaactaagaataagacgtcatcatctgcatcaaacgttgcaacggcagcttctaaatgcgctttcaaatcatctggtccttcatttggcataaaagtaacagcttgtactttttcttgttcgccaaaaatcattgagccagattgcatgattcctttagcaaactccccgtgacttgcaataacgattccaaccattcacaaaaacctccttaataaaaatagttgtcatactcatcaataaaacgctatcaattaatataaaaaaataatggcttaaacattattgactgagttaacagttccacgtttttattttttaaaacgctttactggattaattttaccacaaaattctaatctgtctaatcattttttagattatctgcgaaattggtctagataatcgacaaaaaagcgctaaaagtcgcattacttaagcttttataattagataccgctaatgtttgcggtgtgctaaaatcgttttttatacaaaaaagaccttaaatcgattgatttaaggtctttgctttatttaagttcattgccactcatatattgttgatatttttgttcatcaaattcgttctctgacttggcaataatgactgctgctaatgagtttcccattacgttaacggcagttcgtcccatatccacaatccgatcaatccccgcaatgaaggcgacaccagcagccggaacgccgattgtggtgattgttgctaataagacaacgaatgaagcaccagggaccccagccatccctttagaggtaatcatcaagaccaccaatagagtaatttgttgggtgaggcttaaatgaatgtgataggcttgcgccaaaaacagcgccgctagcgattggtagattgccgaaccatccaagttaaatgaataacccgttggaatgacaaaagaagcaatcccttgactaacaccgtaattttgcactttttccattactttgggtaacgctgcttctgaactcgccgttgaaaaggctagcaccaattcttctttgaaaactttcaagatttcaaagatattgatgtgccaaatccgcgcgaccaacccagccacaacaaccacgaaaaatgccatcgttgcgtaacaaacgatgatgaaatagagcaatggtttcaaagcttcaaatccgaattgggcaattgtaaccccgattaatgcaaacaccccgattggtgctaactgcataatccagtttgtcatcttgaacataacctctgaaatcatttcaaaagcatcgatgagcggggttgcctttttaccaaaggtcgccaaccctaaaccgaacatgaccgtaaagaagatgactggaatcatttcaccagaccccaaggccgcaaagaaattcgttggcacgatatccatgatgatatcacccaagccatgatttccagcggtcttagcggctgctgtgtactgactaattgagccatgtgccaaactatgaatgtcaatcagcgctcctggtttagcaatattgccgacagctaatccgagaataattgcgaaggtcgtcatcacttcgaaatacaataacgtcttaccaccaattcggccaagttttttgatatcacccatcttggcaatcccaacgaccaaacaggaaacaacaattggtaacacaatcatcttaattaaattgatgaacaaggttccgattgattgtaagattgagatagcggtttgattatggtagaaaaaccgaccaaccactaaccctaggccgattccaattaagattcgccaacctaggctaattctaaaatatcgttgctttttcatgttttatctactcctcttgaatgccgcaaatcggcttttaaattgccaataagtccattaagtgttcaatttcgtgtgttggctgtatgtctgtcatttgatttgctagctggttcgggttataccacgctgtggcgacacccacgttctgcccaccttgcacatctgaagtaagtgaatcaccgacaatcaaagcttctgcttgtgagatcccctctaattgttggaagacactttggaaataccgtggatctggtttttgatatcccaactcttccgaaacaaaaacggcatcgaaatatgtgattaatcctgaatcttgtaaccgccgatattgcgtgttggcaaccccgttggttgtgacatatagcttaatgttagctgcttttaacgcctttaacagagcttctgcttgtggcattaaatcatggcctaatgccaagttgtctaaataattttgggacaatcttggtccatcaacttcctgattaaactgttctttaaagaaggttgcaaagcgtgtgttcaataatatttcccgggttaacgtaccttcttcatactgccgccacaagttttgattaaaggtctgataagttgtcttaattgttggggtcaattgaaccccttgatctttgaataattgggccaaagcttgatcttcatccgcatcaaaatcgaataaagtattgtccatgtcaaaaaataaataacgatactgcattgtaaatcctcatttcaactaatctaaatattgtaatttgcctctaaagtcagacagtttagtataacctttttgagccatgcttgtctgtaattcgcgcgttaaacgtttaaaaataatggggccttctttttgaagcgctgtcccaacttggaccatgctagccccacataaaatatgttcaaatgcatcttgaccagatttaatcccaccagtcccaataatttgaatggctggattcaaacgctgatagaaggcatggacattcgctaaggcggttggtttgatataatcgccaccgatgccaccgaaaccatgcttaggtttaatcacaacccgttcagttgccacatcaattttcaagccatttccaatgctattcaccgaattgacaaacgctaatggaaattgattcaaaatcgccgccatctgatcaaaatgcacgatatcaaagtacggcggtaatttaacgcctaatggaccgtgataaaccgtaaaaactcgcgttagaattcgttccaccatttcaaaatcatagcccgtttgcggcttccccggtacgttcggacaagataagttcaattccaccacacctttaaaatcagaagcactaatctgtgccaacagttgctcgtcttcttcaatattaaatcccgtaatcgattgaaagtatgtcttgtctggcactgccttttgctgttgactcacatagtctaaataataaggtaggccttcattcggcaagcccattgaattgatactgcctaaacgcgttggttgataacgtggttctggatttccagagcggggcataacggtggcactcttggtcacgaaagtccctgccattgaagcctgcacttgatttaactcagcagcatcataacaataaacccccgccgcgttcatgaaacagttatcaaagtggtacccagctagtgtcgtttcagtcgaaatcaatattcttgcctcatctctaatttgtttttaatttattatacgttaaatggcatcaaaaaaccactgtttatgaatatcattcgtaaataacgtgatataaaatccattccctcttttttaaacctaattaaccgaacaaccaataacgcagcacatataaaaatcccttggtagtgaatagagataatacttccatctattcattatcaagggattattttcgaatccattctaatcgatgacgcgctcaggattgggacttcattgaatcaggcttttttcgcttgtcgttttagaaaaataatatacccaactaagagcaccaggaatatgccaccacatgatataccaccagttaatggttgttttttgtaaatcaacggcttggtcattagcttgatgggctttttgctctgtaatattaaaccgactcgtaaaataccactaaccgcccgacttatcagtggcggttagcttaagcatttatttgcccggcttcagcgcttcattatcccagttgatggcgtactcaaagttcgaattcggtgccatcgcaatgtctgatttgactgtccggtgaagcacttgatcagagcctaacttggtaaccaccgcatcaactttcaagcctctgatcataacagcctttgtattctgtaaattagccgtaattgctgtccgatagttaacgagccccgctttgatgtgattcagtttcagatttggcgcaataatggcatcactttcggtcactttcagaccgattacataagcgaattggttacgcaatgtcacgcgattcttttgctttttaacggtaggctgcccttcacgaacaatattaaaaccacctaataaagtacaatggaacttcttagcaggcattttaattttaaaaatggcgtccttgctactgtgagccggcaccgttacttttttatcccccgtaatcagtgaggcaatattagcaggcgccgtttcatccgcttttttctttgactggctataatcaacgaccccgttttgattagtcaccgccgtattcggactgatgttaaagatatgcgcttggttatccttattttgcaccgtgatactaatcgtctcttcctgattaggtgccagccttaaatcaaaatatgttacactttgattgttttgactgctgggtaaattcgctttaacttggtaattcatactctgatcagccgcttggacggtcgttgtattcaaccacaacgcgatgccgcccattaagatgacgacgctgattctttgtaaaatatgcatccatttcatttttgaagtccctctctttaatcactttgcacatcgattaaaatttagtccgttgcagtaacgacttaacacttgcctctttcaaatttagcggctgctgccagctaattgaagcggtgtatccccaagtgtccaggtcaaatcagcattatagctgccagcataagcgccaccagcgatatccagtgtaatgccgtcagttgtcatcacatctgcccatgttcccatccctttatctttatcagcactcatcaagatttgcgcattatccaacccatcagcaggaacagtaatcgctttggctgttggtgcagcagtattcgttgaatcactagcgactactttaccgactggaaaattaatctgtgcgccttttaagatatgcgttgaatccgttgtgtctttaaattctgaacttttaacggtaatattctagccagcgccagttccccgtttatcggtgacttgtacgttaggatctttaacgatattcttaacgttttgcgcgccaccagtcagtttcaccttaccaaaatcaagtggtgttaaattatcaatcgtgatatcccctgttgcgccagttggtccgtttccgtttccatctgtccctggcacaattggtgggttagtcgttgttgtgtcccctgcttctagtgcaattttcctcgtagttgtttcattcgatgttgtcgcagcctgtacacttggtgccatcacgatatggcctaatgttactaatgataaataatcaccattttgcggtttttgaagttgtagatggtttagcgcgtacaagcgacttggtaaacgctgatatgcactatcttgtcctggaaaattataagcaacatggcctctatctgggccatcattgggtagcaaaccgtcaaaatcattgccattatggtacgtatcgaattcaacggcaaatgacttggcgattgctgagttatcttttacccaagaaaatggattccgccaaacaccaagggcgccaccggtcacttgctgccaattcttaaccttgtctgggtcattcatcattgcaaaggccatcccgtcaaccgattgcgcttttttgtcccctaaattgacatacattaaacttgtaaaattatgtgtcaaatcaatcttatactgctcttccgaccaaattgcccccttcttgttctggctatctggtgtcacttgcacaattccacctgcttgaacggaactatctaccccaatggagggtttaaagatgccatcgattggaatatgggcgggtatcgctgcttgagtacgaccactattgatacagataaacgtcaataacatggtcagcattgttgcacccagcgctaattttcttctatccatcgtctacctccatatgatttttctatttttccattcatcactacacctttggtacggtctagttatcaattgggatatcaaagattcaatcaattaatcaccaattggacttaatgttttttcattctgataagctattaaattgtgtacaagttgttttaaaacgaatctgttaaatcttttaaagagataatccctatctatgattatgcaacatgtgtaaacttctttaatgccgatatttgtattcggttccatgtcatcaaaatggtcgcgctggagcttcattttatccgcaattttcatcatctaattttaatctttttataattaacataaataaaaaaatcttccttatcccttttgtatcaacatttttagcactttaagacaaaaaaatagaacacttaaaagtgttctaaaatcgcttatttaaggagagtacaggatttgaacctgcgcgccggtataagccggttcgacggatttcgagtccgttgcattaccactctgccaactctccagaacgttattcattataacagacttctaaagaactgaacagcgtaaaacgcaaaaaaacctacgtgcgcccacattctattcgatcaccaccatcccatcttgatcaaattgccagtcctttgagtaagcgacttcccaatagtaaccatcgggattactgaaataaccactatagccaccccactcgccccattctggcgctttgatgagcgtggccccgttagcgagagctgttttaaatgttgcatcgacttccgcttgactatgcgtattaaaggcatgggtcacgccgttgaacgttcttggaaatggatgattatctgcggataagccaatatcggctagtagtgcagtgtacggaaacaattccaacttggtcccagtattattgaaaaagacgattgtctcagcattttctaaattcggcgcttgaaagccgagtgcttggtaaaactgccgtgacacggttaaatcctgaacacctaaacaaattaaatggatactattcatcaaatcacctactcgttttaaattaacctgattgtatcaatccgaagctaataacgcaattctccctgttaattggccaattattaaatttattgaatcatatttctttttataaaaaaattcgttatacttaaagaatcttaaatgatagaggtttattaatatgaagatttcttatcgcaaactaccgtttttattcaacttaattttcttagttgtaacggttttacaatctttgatcattctagtggttaacccccacgttacgaaattcatccccacttatatggatgccatggcgaaagtatggtggttgtgcattattgctattattttgcatattgttgcttatttattatcactcgatcagaatttgattttactggcatacttatgtgcaatcgtcgcttacatcatcttgattttagtccctaatctattactagttgcccttttcttgttggtggttagcttgatcatttcatttaaagtctatcatttccattatcgaacacctgcttagtcctcgtcggagggctatttttttatgcgccaacccacttaatttatggtataattagtttgaaattaaaacaaaagaggttctagtaatgaaacgattaactgcgattctatctttattggtactttgtttactgccttttgtaagcccttactttttcgataaaggcatgcgcttttctagcaatcatcaaaaaaatccaatccgctttgaagtttgtcggcatccaaaggtccaccacgcagtcgatcgtgatggcagtgaacaaaaattaaacgccttcaaccaccgctgcgaacggttctttaatcaactcacacttgcgcctgaagcattctacgccgtagctagatttcttggatttaccgtctttattctattattagaaccactacttgcactcctaatgaccctcaagaaagtgccacaacccaaaaaggcacaatcccatactccgcagaagcatcagattgcgccttataagtggcatttattagattagtttaagttcaacttttgataagtataatggccctcttttagtgattgattcgcatatggcgtctcattgagcaacgccacatattcttgggcccgttgttccgaactaaacgcccggatcattttacttttatcataataaagtgggtttgcttgatataaaacaacgtagatccattgattcatctgtcatcacctaactttgtaatccacataaagaaagaccaactcgtaatgagtcggccttttttaatgtcatcttaacgacgagcttctttgatacgagctgccttaccacgtaatgcgcgtaagtagtataacttagcacgacgtacacggccatgacgagtaacttcgatttgagcaacacgtggtgagtgtaatgggaaagttctttccacacccacaccgctactgattttacgaactgtgtaagtttcactcacgccaacaccatgacgtttgataacaacaccttcgaataattggatacgttcgcgagtaccttcgacaacacgcacgtgaacacgtacgttgtccccaggacggaagtcaggaatatctgaacgtaattgagacttagtaatttcttgaattaatggattcattttgaatctctcctttttccacagatattcattaacgtcttgcgccagcggaataccgttattttgtgactaatcatcacaatttttaattttagcataattcaactgagaataaaagccttatttttcagccgcttcttgcttaatttcttgtaaccagtgcaactgatccttggtcaacgtcatcttctctagtaagtctggacgccgttcatatgtccgtttcaaggacatcttctcgcgccactcgttaatgagcttatgattcccgttcatcaagacttcaggtacctttaaaccgcggtattctggtggtcgcgtatattgtggatgttccaataagccggtcgaaaaagaatccgtaaccgctgattgttcattccccaagacgccaggtacaagccgcgaaatggcatcaatcatcaccattgcgcccaattcgcctccagtgacgacgaaatcgcccaatgagacttcatcagtgactagcgtgcgaatccgttcatcatagccctcgtaatgcccacagataaaaaccaagtggtcttcttgagcaaattcttcggcaactttttggttaaacgttaccccagctggatcgagcaaaataacccgtttgtgccccggattcttggcattcacttgatccatcgcctcaaaaatcggttgtggtcggagcaacatccccgcacctccaccatacggcgcatcatcaaccgaattgtgtttattgactgaaaaatcacggaaatccgtcacttctaaatcaattaagtcacgatcaattgccttaccgataattgattgggataacccattttgaaccatatctggaaataaacttaagacatcaatcttcattatcaatcaatccttctggtacttcaacgtaggctttacccgcttcaatatcaattttcttaacgactgacttcaaaaatggtaagagtaagtctgaacggccgcggcgcttgatcacccagacatcgttgggacctggatcgatgatttctgagactttcccatagctggtcccatcggcttcttcaaccacttctaagcctataatatcaccgtagtaaaactcatcatcttccagatcatcttcgcgttgacttgcagcaatctttaaattatggcccttgaactgttcaacatcgttgatattgcccattccttcgaactgtaatagatagaattgcttgtgttggcgcattgccgccactttaacatcaacaaggccattgggcatttcgacggccagttgcacgccttttttaaatcgtgaatccgtaaagtcagtcgtcgcaatgacccgcacttcaccacggatgccgtgggtattgacaattttaccaacttgatagtatttttctggcatttaatttctccttaatcgacaaaaaacgcctaaataaaacatctctgcttcatttaaacgtttttgttaggcatctacaatatttaaacggacccgtttttggtatggtgctttcacactatagacaatggtacggatggactgtgcaacccgtccctgcttgccaatgacgcgaccgatatcacttggattaacctgtaagtcaaattccataaaacgttctgtctcatgttcagtcaatttgacgtcttccggatgttcgacaagtggctgaacaattgcaataattagttccttcacgtctgtcataacgaatccctactttttagcgaagcgtgcttcgtgatatttttgcataatcccttgttttgataaaagattacgaacagtatcagaaggttgtgcgcctttttgtaaccaatccatgataacttcttcttctaacttcaagtcaactggttctgttaatggattgtagtaacctacttgttggataaagcgaccatcacgtggtgaacgtgaatctgcaacaacgatacggtagaatgggcgtttctttgaacccatacgtttcatacgaattttaactgacattaatgccacctcctattaattctttaacatgtcataatataccaaatttcaaacgccgtgtaaagtgttttttctttacaggacaaatttttttaagatttaaaacgacgcgcgtttttgagacgtttcttcttgtttttcttttgttttttcatcattgaattcatggccatcttacccattttacccttgataccgttgcccattaaaccttccatgccgttaaagttgccctttgacatttggttcatcatctttttcgattgattgaattgtttgatcatccggttaacttcaacgattgggcgaccagcaccagccgctaaacgacgacggcgactaggattcaataagtcaggattttcccgttcttgtggcgtcattgattgaacgatggccttcatatgcgccatgtctttcggatccatcttgatgttcttgagttgtgggttattagccatccctggaatcatcttcatgatatcttccaaaggtcccatgctctgcaattgatccatctgatccaagaaatcgttaaaatcaaagctattttctttgatcttttcagccatatcagctgctttttgctcgtcataatcttgttgcgctttttcaatcaagctcaacatgtcacccatcccaaggattcggctactcatccggtctggatagaaaatgtcgagttgatcaagtttttcgccttgaccagtgaacttaattggtttgccagtgacggcgcgaattgaaagggctgccccaccacgtgtatcgccatctaacttggttaggacgaccccggtgacatctaaacgactgttaaagccttcagcaacatcgacagcggcttgcccagtcatggcatcgaccgttaagaggatttcatttggatgggctagctcattaatatcagccaattcttgcatcaaggcttcgtcaatttgtaaacgaccagccgtatcaattaagacgtaatcgttcttttgtaaggccgcttgtgctaacccttgacgaacgatttcaactgggttgacatccgtccccatttcaaagacttgtgcgtcaacttgcttgccgacggtcttcaattgttcaatcgcagctggccgataaacatcggcggcaatcatcaatggccgtgctttttcgttttggattaaatattttgctaatttcccggccgtggttgttttcccggccccttgtaacccaaccatcataatgattgttggaatatgtggtgatttattcaacggcacagccgtttcacccatcatcttcgttaattcttcatcaacgatttttacaatttgttgtgcaggtgataagctatcaaggacttctgccccgatggcgcgttccttgacgactttaataaagtctttaaccactttaaagttaacgtcggcttctaataatgccagccgaatttcgcgcatcgcttgattgacgtctgtttcggtaatcttccctttacgccgaagcttactcaatgcgccttgtagtcgttctgttagcccttcaaatgccattttttatcagtcctttaagttaattattgttcggttaaattcagtaagtcagccaacaagcgcatcagttcttgatcgtctggatagtgcgcttgaatatacttttgtagcgtatctgcactggcattttgctgttcataattacggtaaagatgtagcttttcttcgtaaccctctaagattttttcagtccggcgaatgttgtcatagaccgcttgccgactaacattgtattcagcagcaatttcaccgagggaaaaatcatccccataatataaagagatataactatgttgttttgccgttaaaagtgcgccataaaattcgaacaacgaattcatgcgtgcgttttgtgcgagttccatttgacgcctcctagacttagtttgacctaagtattagagtaccgattttaacgggcttagtcaacgttttattgcgcgatttaactagaagtttgtgcattaattatcttttcactggtataaacgaaaaatcatgctaaaatagaactgtaagctttttcataacttaaattggaatttctatggaggttgtatgatggcagcaacaattatctattggggcgttatattcgcattaatcggttgggggatttggaacttaatcttctcagtcgtctatttaaagaacaaggaaaatggtaatctttggttcttcgccattttaaacatcttaaccttattattcgggctattattctggtgggtcttcaacaatcacgcttggcaagaatactggttggttaaagcaaccgcaaccaacagtctactaggtggcgttttaatcgcctatgtcgtcttaattatcgcccaagtgattttgggacgcgaaccaaaagccaaaacagcttaatgctaaaaaagaggatcgacacgtttgtcggtcctcttttctaatgttgtttagcgattaatcgcgcgatattttcactgacttgcgttaaattaacttcagtagcttcaattgcttttgctaatgacattgcgccaggtgttgtgcagaaaatactgtcaattcctaattcataaagcacatcaatccccgctccaatatatccggcaatcgcaatcaccgtcgcctgtggattaacttgtttaaccgctttggcgactccaattggcgtcttaccatattgtgtctgaaaatcgattccgccctccccagtgacgacgatatccgcatctcggaaaatctcagttaacccagtttgcgccacacgaccatctcaacaccaggttgaacctgcgcatccgtaaacgccaataaaccagcccctaagccaccagcagcacccgcacctggtatttgcgcaacagatttccctaaatcacgttcaatcaccgcagcaaagtgcgttaaattccgatcaagttgcgcgaccattgctggggttgctcctttttgtggaccaaacacggctgatgcgccattcgggccgacaagcggatttgtgacatctgatgcaatcacaaccttaacccttgatagtgccggtatcatatgcgtcgtatctatccgtgctaaacgcgcaagcgccccaccgcccagtggtaacacctgtccgtcaacatctaacaaacgcaccccaagtgcttgtgccattccagcaccgccatcattggtcgcactgccgcccaaaccaatcacaattgtttgcacaccttgtgctagtgcggctgccattaactgaccggtaccataagtcgttgttatcaacggattttgcgtttgcgcatcaacatactgaatcccgctagcagctgccatctcgatcaccgccgttttgccatcacccaagatgccatattgtgctgataccgtttggtccaatgcattttgcacttgtgcggttaagaaccggccattggtcgcatcgacaagcgctttgacagtcccttcgccgccatctgccattggcacttcgacataggacgcgcttggtaggcttttttcgaatcctttccgcattgcacgagccgcttcttttgcggtaacagcatttttaaatgaatctggtgctaacacaattttcatctgttaatctctctttcttctaaaaaaaggctagaacaaattatttgtcctagcctttttgctatttaatcgcttgactgacgtctgtatcagttgttttttgtggcccatcaccgacaataatatccttgaataagccataaacaaagcggtttggatcaaagagttgtaagtcgttcatttgttcacctagaccaaccatcttcactggtaagtgtaattctgtgcgaacggctaaaacaatcccacccttggccgaaccatctagcttggttaagacaatcccagtcacatcggttgtttgcttgaattgtttagcttggactaaagcattttgtccggttgttgcatctaagaccaacaatacttcttgcggtgcagctggtacttcacgcgtgatgatgcgtttcactttttccaattccttcatcaagttgacgttgttttgcaaacgaccggccgtatcaactaataaaatatcgaattgttcttctttagcgcgcttaaccgcgtcatagacaactgacgctggatcactccctgctgcactagcaaccacggggacattatcccggcgaccccattcttgtaattgttcgatggcgcccgctctaaaggtatcaccagccgctaataagaccttcttacccgctttttctaattggtgggcaaacttcccgattgaggttgttttccctgcaccattgacaccaacgaataagaagacagttaattcgccttgtggagcgaaatgcaattgattatcttctgcttggccttcttgaccgtacaaatcaactagcttttcaacaatcgcttgtgaaaccgcttctggtttcttaacgttacgcaacttcacttcgtcacgtaattcgtcagcaatcttcatcgctgtttcgtagccaacatcggcttcaattaacatttcttcaacatcatcgaaaaaggcttcatcaacacttctaaagttagcgaacaacgcatttaagcgttgcccaaatgtgagccgggatttttctaatccatcatcatacttcttcgtttcagcagcttgcatgtcgccagttactgcttctgtttccggcacttcttcaatcgcatcggattcttcagttactgccgacgcttcaactggttctggttctggttctggttctggttctggttctggttctggttctggttctggttctggttctggttctggttctggttctggttctgagtttacgggtgccgccgttggtgtgtcaagcggtgataccgtttctgaatcatcttcagttgctaaactggctggttcatcggtttcagttttctcagctgccgcagtttctgcaggggtttgcgattcaaccggcgtagcgtctgattcaaccggtgtttccggtatcgcttggtcttgttcaaccggtgtttctttttctggttcggctgagaatgcttttttaatacgatcaaataatcccatggttttcctcctaggctgttgcgtgttcttctaatgaaacggaaacaatcttcgagattccagattccgccattgtcaccccgtataagcgattggcttgggtcatcgtcccttttctgtgggtaatcacgatgaattgtgtatcactctcataacgtttcatgaaacgaccgaaacgatcaacgttggcttcgtccaacgaagcttcgacttcgtccaaaatacaaaacggcactgggcgtacttttaagatggcaaacaataacgtaatcgccgtcaatgcgcgttcaccaccagataaaagactcaagcgttgtagtttcttaccaggtggttgcgcaataatgtcaatcccactcgttaatagtgcgcttggatccgtaaacgttaaactggcatggccgccaccaaacatgatcgggaagatggtttcaaaagcagcggcagtttgttcaaacgtttccttaaaccgcttttcaacttccgtatccatttcagccatcgatgctaataattggcgcttagcgtccatcaagtcggcatcttgttgcatcaagaaatcgtaacgttctttaacatgttgataatcatcaatggccgccaagttgaccgttcctaaatcagctaagccgagtttcaataatttcaacttagaccgcaattgatcgtcggttaagtctgatgcggccaaagcggccttggcggcttcgtaagtcaattggtaatcttcgctcaatgtatttaagcgttgatcaatgttaattttaacccggttgagcccgacagcattttgttcttgctcagctaaactatttttttgtaattggtagacgcgtgtggcattggcttgaagcgtttgttgttccgccttcagcgtttctttttgcgcgcgttcagtggctaacttcgcttggactttctcaatcaaagcattggttgcctttagcagtgctcgtcgttctttttgactcgaagcgtcttcttgatccgcttgttttagcgcagctagtttatcctgactggccttcaactgggctgccaggtcgttgctattgcgagtagcaaccgttaatttctcctgaacattcttttgttcagcttgagcgacagccaacttggtttcgagggctgtttgttgttgcgcaatttgtttttgactctcatcaaaatgttgtaattgctcattagctgtttcgagatctgcttgcagctgtgcaatcgacgcaacaatttcagcttcggctgccactaattctgcctggcgttttaaatctgcctcataagcttgttgttgttgttgcacttgataatcggttgcttgttgttgccgttcaaactgactcaaacgttcgtcagtcaaggctaacgtattttgggcagcttgatattgattcttagcggtttccaatgccgcttgtttcgtatttaattctgcttggcgtgccgttaattgagcttttgcggcttggacactggcttgcttttgatccaaagcgacctgcatcttggcaatttgaccttctaaatcagtcaaggtttgcttacgcgcaagtagcccaccattgttttgtcggttattatggcccccagtcatcgaaccacccgggcttaaaatatcccctgctaacgtaatgattcggtaacgatgccccgtcaattgactcaatttaatcgccggctccaactcagtcgcgacaatcaaattgcccatcaaatggttcatcaccggtcgcacttgttcatcaaactgcacaagctcactggcaattccgataaatccaggctgctgttgtaattggtgaactaagctacttggtagtaaacgtggtttgacaacgttattgggtaagaaagttgcccgcccaatccgattggttttcaaatactcaatcgcttgtttggccgtctgttcatcccgtgtcacaacttgttgtagctgtgcgcctaatgctaattcaatcgcttgttgatactcactgggcacttgcatcaattccgctacagcccctaataaaccagggaactgttgtttttgcttcaagacagccttaaccccttgataaaagccggcgtagtcatcatttaattccgcaagactggcttgttttgctttcgctttttgtaaaataccagacgcttggaaccaactattttgttgattttggtaagccgcttggtccgtgttaatttgcgtttgtaattcggccaactcattggacaacgtttcgtattgcgctttgagtgtttcaagttgggctttttgggccgcttgttctgcctttttttgtgccaattgcgtcgatgtctcatcgactgcactatcttgccgtgcaagttgcgttttagtttgtaacaagttcttttctaaatattgttgttcattatgattggtcgtttgggcttgcatctgatcgatgtattcttgacgaatttgttcaatcttcgctttcagttccgcttcactaccagacgcttggcgtttaagggtggttaactccgtcttcaacgcccttaatgccgtcaccttttcttcataacttgcctttaattcagattgattggcttgttccgccgttaattgctgttttaatgtgtcgatctgttcgactaaactttggcggttcgcatccgtataattagcgcgctcttttgaaacgttctcttggcctaatagattttcagctaagcgagacttttctaacaacgtctgattatcttgttctatttgttgttccaactgggctaaggttgcctgattctcggtttgggcagccgtcgtcttagcgatgtccgcttcaatctcttgcaacgcttgcgcaagggtttgcgccttttctttgtacgtcttttgatcagccactaattgatcaatttcaatcaccaataattgttggtgcaacgtatcatattgcgctttttgatccaagtaatcctgcgcaatactgctttgttccttcaacggttcaacttgtccccgtagttcatgaagaatgtcggtgacccgactcaaattttcatctgtttgatctaattcagattgagcctttttcttttgttgtttatatttcaaaacaccggccgcttcttcaataatattccgccgatcttctggtttactgttgaaaattgcttcaacccgaccttgcgaaataatcgaaaaagattctcgcccaaggccagaatccataaataaattaacgatgtcttttaaccgacaactcttttgattcaaataaaactcactatcgccatttctaaataaacgccgcgtaatcgtgacgttggcttgttcttgtttcaaatattgatcgctgttatcaaaagccagcgtcacttctgccttattcatctgtggtcgaatatcagtcccggcaaaaatgatgtcgggcatcttttcgccccgtaagctcttggctgattgttcgcccatcgcccaccgaattgcttctgtgacgttacttttaccgctcccgtttggtccaacgatgcccgttaaaccttctgaaaaattgatttctgttttatcagcaaatgatttaaaccctgataaaaccaatgactttaactgcatgcactaaactccctacacacggcggttggtttcaactgtcgtttgcttctttctttatttcagtttggaaagcgccactttagcagctgcttgttcggctgcttttttgttccggccaacacctgaacctaagacgcgatcgcccatcatcacatccacctcaaattgacgggcatgtgatggtcccacttctgccaataacttatattcaatctcaacttcaccatcttgttgcaagaactcttgcagattggtcttataatccgtttggtctgaaaattcaccggcttcaatcttgggaaagacaacttgttcgatgaatttaacaactgcgccacgcccttgatctaagaacaaagcgccgttaaaagcttcaaataaatcttccaaaagtgttgctcgtgcccgcgcaccgtttttttcttcccctttaccaaggcgaatgtatcgatcaaagtgcgcttctttggcaaaactactgaaactcttcgtgcagacgattgccgcccgtaagcgtgtcagtttaccttctggccagtccggatattttttatataagtattccgaaaccgtaatttccatcaccgcgtcacccaagaattcgagccgttcgttatcacgaagacccaactcccggtgttcattgacgtatgacgaatgtgtaaaggcttcgtccaatagtgctaaattctgaaattcaatgccgtagcgggctcgaagctcgctcactagtgctgcatccaaaattaaattaccccatttcaactgtttaatctttcactattataccgtttatacgcttaaaaaaacagcgtcgttcctagcaaaccgtttcttttattaatcactaaaaaacgcctgttttgaagtattcattgtaacacgcaaacgaatatttcaaaacaggcgttgctttatgcagatggcgttgtcattgctgctaaagcggtttgataactcgctagttcagcttcagttgcatagacatagtgttcatcggccacttcgcgcaattgacgaccttcattatctgcctcaattgaactatcataagcaattcgccgacgttgccgctcgacctttggatcaggtaacggcacagcagacaatagactttgcgtatatggatgcaatggtcgatcataaatgtcatcggctgatgccaattccataattttaccgttatgcatcaccgcaatccgatcactaatgtatttcaccatcgataaatcatgtgcgatgaataaatacgtcaagttttgctgttcttgaatttctttcatcaagttaaccacttgtgcttgaatcgatacgtcaagcgccgaaatcggttcatccgcaatgataaatttaggttttaccgcaagcgcgcgggcaatcccaatacgttggcgttgcccaccggagaattcatatggataacgcgttgcatggtctttattcaaaccaactaattccaaaagctcgttgacgcgtgcatcacattctgcatcatttttaaccaaatgatggatatgcaagccctcagcgatgatatctttgactttcatccgtggattcaatgatgcgtagggatcttggaaaatcatctgaatctctttccggaacgccttcatttcacgactatgatttttaatcttactaatgtcacggccatcgaatagaatttcaccatctgtcgggttgtatagccggatgatactccgcccagttgtactcttcccagaaccagattcacccaccaagccaaacgtttcgccttcatagatttcaaatgagacatcatcaatggctttgacttcggatttttttccttggctaaaatattgctttaaatgtttaaccgacactaatacttttttatccttgtccatcaattgtccctactttctcttgaacttgtgtcgcctggtacttagccatcattgcacggacggctgctggtggttccacagctggtgcatctggatgcaacaaccaagttgccgcaaaatgcgttttcgacacttggaaaaatggcggttcctgttccacatcaatttgtaaagcatatggattacgcggtgcgaaggcatccccttttggtggatccaacaagtctggtggggtccctggaatggcttcaagacggccagaagtatcaagtgttggcattgagttcaataagccccacgtatatggatgcttgggttgataaaaaatttcatcaaccaacccatattcgataatcttaccagcatacattaccgctacgcgatcggcaatccctgccacaacacctaaatcatgcgtaatgaaaataattgaggtttcaatcttgcgttgcaattccttcatcaaatcgataatttgtgcttgcactgtcacatcaagcgcggttgtcggttcgtcggcaatcaggatttgtggataatcaacaatcgcaatcgcaatcacgattcgttgccgttgcccaccagaaaattgatgcggataatctttcatccgtgctttggcattcggaatacccaccaactctaaaacactctgtgcacgtttcattgcttcttccttattcattgttttatgaatcaacaagggttcagcaacttgtttaccaatcggcatcgttggatccaatgacgtcatcggatcttggaaaatcatggaaatatcgctaccacgtaaggcattcatttcctgttctggtttttgtaagagatcttcattgtgatacttgattgtaccacccttaatttgagcattgcccgctaacaagcccataatactacggaccgttaccgacttacctgaacctgattcaccaacaatcgctagtgtttcgccttttttcaagttgaaactgacatcgcgaatagcatggacgttccctgcgtaggttttaaaatcgatacttaaatgtttaacttctaaaatatttgccatttgacgacctccaatgatgaaaccgcgtggaaacggccttgtattgacatgctttttgaaactgactctgcttctaaacgtgctttcattaactgctttttatggttagctacgtctaacaaataatcaacaagttgattattcgccagactatgctaatccgcgaaagataaccgcctacttacacacgctatgattttggatcgaatgcgtctcttaatccgtctgctagtaagttgacggcaatcatgatcacacagaggactgctgctggataccacatttgatatggcaagaaacggaaagctttttgcccatctgataataacgtccctaatgaagcattcggcgctggaatcccaatcccgataaagctcaagaatgcttcgaagaaaatcgcactcggaattgtaaacatcgtttgaataataatcgttgaggataaattcggaatcagatgtttccaagcaattttggtggaactttcacccaacgtccgtgcggcgagcacgaattcttgttccttaagttggaacgtttgagcccgaatcaaccgggccattgtaatccaaccggtaaacccaatcgcgatgacgattgacaataaacctggacggagtaccaacatcatcaagacaaccacaattaagtttggaattgatgaaatgatttcagttacccgctgcatgaacatatccaaacggccaccacgccatccggaaacaatcccatatggaattccgattaataaatcgaccaatgtcgctagaatcccaattaataaggataagcgtgtcccgtataaaattcgtgataataaatcacgaccgagataatccgtccctaagataaacgttttgcctttgggaacgcccgcttgttgatatttatcaactttaacaccggaaacgtccatcttaccggtaaaaccagggatattccccgatccaattttagggggtaggttagcgtacgccacattttgtgtatttggactttgtggtgcaatcactggtgccaataaagcagccaacatcacaatcaagaggacaactaatgaaaccaccgcgactttattttgctttaagcgccgaatggcatcttgcgtaaacgtcaatgatggtgcactaattttttcttgtgcttcatgcgtgtcttgtgtaaggggcttgaatgagcccgctggtattttaatatccgccatttagtgcgccccctgactgtcacttaatcgaattcgtggatcaataatcccgtaaagaatatcgacgactagaataatcactgttaataagaatgaatagaaaatggtcaagcccatgattgttggataatcattcgtcataattgacttcacaaattgttccccaatcccgggaatcgagaaaatattttcaacaactagtgacccagtcatcaagttgactgccatcggcccgataatcgtaacaaccggaatcattgaatttcgtaaggcatgctttgccactgtttgccattttgaattgcctttggctttagcaagttcgatgtaatcactgtttaaaacatcgaccatttcagtccgcatgaaccgagccgtattcgccaatggtgcaaccgctagtgctaatgttggtaagacactagatgaccagccgtcccataacgcaattgggaatagttgtaatttaaaggcaaggaaaaattggagtaagaccgccaacacaaagttcggaattgaaatcccaacgattgaaaagaacgttgcaacgccatcgacccatgtattcttgcgaatggccgccactgcccctagtaaaatacccagtaatgagccgacaatcatcgcttgtgccccgatttgtaatgaaggtcctaaacgcgtcatgattaggctcaagacgggctgattgttgaactggaaggatgtgccaaaatcaccatgcaacaagccacctagatagatgaaatattgctgaattaatggtttgttcaaaccgtactgttcattcatgatccgtaattgatcagcactcattttttcctgattcgtatatggcgtccctggcatcaacttcatcatgaagaaggtcacagaagcgacaatgaatagggttagcactaaatagaatattcgtttaataaggtatttactcataagttcgctcctaacaaaaacgggcttcattgtttttcaacgctgaagcccatctttataaagtcagtttatttttttaaataaagtgagacattattgtagcttcctgaagggccgtagtctaaacctttaaggcttgggttagttaagtacgccacacctgattgatacagtggaatgacacctgactctgtattcataatatcttgtgctttaacaaggttttgccatcttgctttaggatcattggcgttgtcacctttacttgccttgatctgtgcatcgtattcggcattgctccaatggccatcattgttatcgccgcctgttacaaacaagtctaagaatgtgattggatctgggaaatcagcgttccaagcactaaccaccatgtcgaaatcaccgttcgttgaacgtgttaaacgagtcttaaatggcacgttcgctaatgtgactttcaaacctggtaagttcttttgtaaagtattttgcaaatattcggattgtttcttggcagtatccgtatcatcgccaagtaatgtgtaattgaatgttttgcctgtttgcccagtttcagcaaggccttcgttccaaagttttgttgcttctttagggttgtaacttgcatttttcttacccgctgcgtctaaatcatcaacaaaatccttcttagttgttgggtcaaatgacatattctttggtgtcacagaagcaattggacttgaaccatcacctagaacctgtgcgactaattctttacgattaattgtcattgaaattgctcggcgaatcttcgcatttttaaagattggattcttttcttggttgacttgcatgtagaatgttgctgatttttgtaaggttgagtaatgtggatcgtttttcatttgtttagctgtgtcaccactgatcgccgtccgatctaatttattactttggaagaggtttaaagctgttgatggatctttaaccacttgatacttcaacgtcttaaccttaactgctttcgtattccagtaattggtgtttttaacttctttccatgagctatctgggccattccaattttctaatttataagggccgttgaaaactaatgttttagaatttgtcccgtaactcttgccagctttcttgactgcttctggatattgggggaagaatgttgaactggtcatcaattgactgaagtatggaattggtttttcaagggtgacttctaaggtgtgtttatccttagcgactacacccaatgaattaaccggttccttaccagtcgtgatgtctgctgcatttttaatgccttcatagatataagcatattgtgaaccgacctttggatcaacgactctgcgccaagcataaacgaaatcttctgccgtgaccggttgaccgttgctccacttcgcgtcttttcttaatgggaatgtatatgttaaaccgttattagttggtttgactactttagtcgcaatcgccggtttaatttctttaccctcgtagcggtaaagaccttccatcgtatcggttaaagcctgtgcaccgatcacatccgtatttaacgctgaatccattgtcgaaatgacatccccagttgcaaaactggctgtgtcagtcttaacggcttccttgctacctgagttaccacaagctgctaataataatgtgaccgccactgttgttatacctaataccaaactcttttctcgtttcatatggacactcccttcagttattaaagataataatacatgattaaaaatgaaaagtaaataataaagattaaaatattctaatttattttcattgatacagagccattataagaatcattctaatattataacgcatccgcaaatgattattatgtgaataatctcattttcacaaactgtttaaaaaaataataagttgggagaaatcagcatgattcaaaccgtaacagaacagaacatcgcaagctttgttcaaacacaaccgttagtgattttagacttttgggcggattggtgtgcaccttgtcggattatgacaccgatgattactgaattacatgaacaattagctgatcagtttggcttaggaaccgttgatgtagaggatcaagcagcgttagctgaacaatatgcgattcaatccgttccaaccctattaatcttcaaaaatggtcaggcgacagaaaaggtaactggcgcttttccaaaagagaagttaaaaagatacttagataagaaaatcgctgaaatgtaatcagcgcattaatagtagcccgcaactttcattggagagttgcgggtcttttttgataagtagaaataaaataacccccttagctattgtctaagggggagatgattattgacgaaccatgtggataacacgttgataaaggattaatgcgccaatctcacaaagtaaaatcaaaacagctaatggaagataggtataactgcccatcacgccaactaatggggaaagaaaaatgccgaaaacatacatgccaagtccaagcactgaagaagcaatccctgcatgttgtccttggcgttgtaaggccagtgaggtgacaacggcattaattagaccaagtgttgcgaccactaggaataaaccaattaaagctaaccagagacgattagagccaaagccactaattaagacgcagatggcaccgattaaaccaccaattaagccgatttttaattgttgtaattcatcaaaccaatggattaaaatggtggacatttcagccattaagataatcccaatcccattgattccgtagattagactgaaagttgatttagaaagactaaagacattttgaagcatgaaactggaacctgaaatataacagaacattgccccataaacgaggccttgaattaaaacaaataggatgaatgggcgatctttaaaaatggcttgaataccaaggcgcgattgttgtgccgattgcgcgcttgtggatactgtgtgtgtttctttgaatcccaaaatgatgcctaacaatagaagaaggccaacaatccctaaaaagccgaaaatgccttcccaagaggtgaaacggagcaaagcacttcctattaatggtgaaatgatggggaagataccgttgattgccatgagtaaggcaatgaattttgtcaattgtttaccgtcaaataaatctttagcgactgctcgagtaatgacctgtcctgcagagctcgctaacccttgaataaaccgtaaaaggaagaatagccaaatattgtgggtgactaacgataatagacacgctgtaaaagcaagggcggttccgattacgagtggctttttacggccaacacgatcgctccaggcacccatgaagatggggccaatcgcaagtccagccaaacacatggttagactcagttgaatcatggaagcagatgaatgaaaatcagcttccataatcggaaatgctggtagatacatatccactagtaggggtccataagcactcagtgaaccaagtaaaacagataaccatagtgttcttttttttgttaaaaccatgttaataaaccctcctaaataaaaaagtgtaaaaaaatagcccgttgaaaacgtagctagcgccgaacgaatttaattaattactattcatgttgcttcttagttacactaacataagaagtcgggtttgtggcgatatatgagcaatttttaatatgtaaatggtttctatttcagtttaaacaagttatgatggagataatgaaaaaagttgtcgaatgaggttttgccatgaaaattgcccaaaaaaataaaatattagaaacctgcctaattgcgggacggattatgattgaaagtggttctgaaatgtaccgggttgaagatacaatgaaccggattgcttataatgcaggcattcaaaagagtgttgtgtttacgacaccgaccggtttatttatcggaattgaaaatcaaccttatgtgcaactaggcgctgttgcggtgcggacgattaaccttggaaaagttgaaaatgtgaatactgcttcacggcaatttgcgactaaggaaattacgttggatcagttaatgttacggttaaaacaaattgatcaggatacagctcattttccgttgtggttacaaattacagctgcagcagtcatttcagcgtttttgatgattattttttctggtgaatatgattggttagacatcataccgtcagcggtagccggtgctttaggctatgccgcctttgcggcggtcaatcgggtcacaacgattcgctttatcggtgaatttttaagtgcgacagtgattgggatagtcgcctatctattaactaggtggcacttaggagtcgatatcgataatattatcattggggctgtaatgccattggtacctggtgtagcgattaccaattcgattcgagatttgctagcagggcatttattatctggtatggcacgtgggatggaggccatcctgagtgcctttgcaattggaacggggattgcgctcgtatttagattctttatgtaaagagaggttcatcagatgccatattgggttcagtttattattcaagcgttatttagttatatttcaacggttgcgtttggaatttgtattaatttaccaagacgcgcattattatggtgtggctttgccggtatggcagggtggcaggtctattggatgctctttaactttggtagcgggcggatgcttgctaatttgttgggtgcgttagctgttgggatttgtggcaatattatggcccgttataagcggatgccggtgattatctttaatattccagggttagtgcccttagtgcccggcggaactgcgtatcgtgcgattcgaaacctcgtgctaggcaacttaaatgaagcttcgacacaaggtgttgcagtgatcatgattgctggtgcgattgccgttggctttatgttagcgcaaattttagccgatataacacgcaaacgagcgattacgccgaaatgggtatcgcgtcactaaaaagtatgctataataaggttatgcgatgagtcgagtaagtctcggtaggcaactattctgcgaaggcagctaggagacccaaagatacaggataccacggttattcatttaaccacttgccgtattgcaagggtgttttcgcccgctgtgttgtggagcacaaggtgtttattcttcggaatactgtaaaaaaagccccttccgtcaggaaggggcttttttttgtgcgttcattttcttgcatgacagcgttactgatggtgcgatggtcgactaattcaccaatccgttttagatgtttgagatgtgcatcgtagtgttccgaaaaaacgagcgcgtataaaacatttaataggaagatgatggaggtattaatggtaaagttgccgattttcgagtagagtttttcgcgggttgtaatcggtaaaaagcaagtgcattcttgcgaaagtcgattttcaccgatactggtaatcgcaatcgtcgggatgttgcgggcgcgtaaaatagtgttaagtgctagtaagttgggattctcgccagaataggaaattaaaatcgcacaagcatccggactaagattataggcatcgtagttttcctcgccacgaaccgcagatagcgtaacgtttttttggatacgattcattttgagggcaaaatcttgcgcgatgagtaagtttgagttttgggagaagatttgaatatgatttgccttgaggagcaatgatttagcttgactcagatggtcgtggtcgagtaaaaagaagatatcatcaatcgtcattttgtccaagaccgccattttcttacaaatagtcatcaaactatccgtactcgaaaagggcagattgggatcgatacgcgtaaaatgtttattgaggtagcgccactcttctagatagtgtttcttaaaagatttccaaccgtcaaaatggagttttttggcaatgcggaccagagtggacggttgcgtataggtttgagcagcaatttcttggatggaaagctgatcgagtgcttctggagccgttaacaagtaatccacaaccacggtttcagcgggggaaaacgcgaatgtctctagtttttctttaattaacatgtaaccgcctccttttacaaaagattagcgatatttgtaaaataagtcaatcgataccctagtgatttgtaaattaaattcgcgtttaggccattaatatcggcagtttatgcgaactcacttttaaacgagggcatagaggtggggtttgcggtttgcgttaggtatgcttaatttgtaaacaaatcaaaggaggcattcagatgacacggaaagtaaaaattgcaacgattggtggcggtagtagttacacgccagaattgatggaggggtttattaagcgctatgcggaattaccaattggtgaaatctggttagtagatgttgaagcaggcgattgtcggaaaaatggcgcaacgaatgtgggatgcgtccccgtatgatgttcagattcatacgaccttgaatcgtgaagaagcgcttaaagacgccgattttgtgaccacgcaatttcgtgtcggccaactggatgcacgggtgaaggacgaacgcattccattttcatacggtctattggggcaagaaactaatggcgctggtgggatgtttaaagcatttcgaaccattcccgttattttagaaattgttgcagatatgaagcgcctctgtcctgacgcatggttaattaattttactaacccaagtggcatggttaccgaggcagttttaagatacggttaatgggaaaaggtgattgtttgtgtaatgtgccggtcgccgctaagatgggagaggctgaaacgttaggtgtgccacagacggatttaatctataaatttgcaggggttaatcactttcactggcataaagtagccgataaaaaaggtcatgatttaacgccgcaattgattgataaattatatgaagaaaatagcgggttaccgaaaaatatttttgatgttcctttctatcgggaacagttacagcaaatgaacatgatcccgtgtggctatcatcgttattactatcgtgctgaagaaatgttaaagcatggtttaacagaatatgcgactgaaggtacgcatgcgcagcaggtgaaagtcattgaatacgaattgttcgagttgtataaagaccctgatttagattacaaacctaaacaacttgaacaacgtgggggtgcttattattcagatgcagcctgtgaaacgattgcgtcgatctatgcgaataagaatacagaaattgtggtttcaacgcgaaataacggggcagtccctgatttgccagcggattgtgcggttgaagtgacggcctatgttggtggggctggtgcgcggaatgttgcgtttggaccattgccaacagcagaacgtggttggttacagatgatgaaatcaatggaattgttaaccattgaagctgcgataacgggtgattatggcacagctttacaagcctttattagccatccattggtgccatccggtgaaaccgcaacgcgcgtcatgcatgaactactgattgcgcataaggcttacttacctcagtttgcagacactattgcacggttggaaaaagaaggcataacgattaaggatgaagtggttcgaaagatgtagtgatcatccaaaaaaggattggcgagcagcgaatcctttttttaatcccttaaaaggcgctataatctgtaaagattgatagaatggtagcaaggggcggttagtaaatgtttgaacttgaaaaaatccagcagttgaatacattggagctatcagttttaaagtatgttttaaatcatcgcgcacaggtcgaaaaaatgacgattcgtcagttggcgacccgagcgcatgtatcgacgtcaacaatctcgcggttttgtgagaagctagggtcgaggggttttcggaattcaagtatatgctaaagcaagagcggttggcgcaaaaaaagacatcgatgcctgaatatgatgtcatgttgccaattaccgagtttttggataaaacgaataacgaaacgttcagacagcttttatcacaagcaacggcattaattttagaggtacaagctgtctttttctttgggatcggcactagtggtgccctggctcagtatggttcgcgttatcttgccaacgctggtattttctcgctgagcatcaatgatccatttacaccggtggggatgcgagaaacagtcgtggcggataccttattagtggtgctctcggtgtcgggggaaacaactgaaatgctggcacaagttgagcaatatcaagcaggaaaaggcaaagtattggcaattaccaacagtacgcattcgactttagcgcggttagcggacgttgtgattccgtattatatgcctgaagaaaagaatggttccttgaataatacgacgcagataccggtggtttatattctagagttgctagcacatcgggttgcttgcgttcagtaagtgttgtttgaaacatgttatttttaagaaacaaataccaatcagtggtgcatgtgtttatcaccgttaaaggactagtcgcccagatggcaaagcgctatactgcaattatggaagcgcattctgaggcggtgatgttgatcaatcgccgtgattaaatagcgaagggaagttaaacacatgaatacttggattaatactaaattaatgccacctattatgaagtttgttgcgacgcggccgattacagcgttgaaaaatgggatgctatacgtgatgccatttacaatcgttggatcgattttcttaattttagccaacttgcctgttaagagttgggccgattggatggtttcaactggtttgaccccatattggaacgttgcctataacgcatcgtttgcaattatggcgttaatcgccgttgcggggattgcttattcttgggttcaggatgaaggttttgatccgtttccagcctcattacttgctattgtttgtttctttcttattagtgacgcgcccaagcactgccattgtttcggcatccggtaagattgttgtctctgttaaaatgatgagtcaacaaaccgggtttattgatcggacttggcttggtggacaagggatgattactgccattattgtcggtttactagtcggttggatttactcagctttcttaaaacatgatattcggattaaattaccagaacaagtgcctgcgaacgttgcaggttcctttaccgctttgattccagctgctgttttaattagtggctcactcttggtttatatcttcttcgacaaggttgcaaactcaaccttaacagaatcaatttacaataccattcaagcaccacttcaaggaattaccgattcatttggtggcatgttagccatttctttcttagtaccattcttgtggttcttcggggtgcatggttcaacaattgttggtgggattatggggcctttattgcaagccaactcactggctaaccaaaaaatcttgggttcaggcaaagcattaacgttagctaacggtggttacattgtgacgcaacaattacttgatcaatttatgacagttaccggtgctgggatgacaattgggattgttgtttacatggcattctttgccaaatcagcacaattcaaaaatttagggaaattatcattagcaccagcagtctttaatattaatgaaccgattttatttgctacaccaatcgtgatgaacccgattatgatggtgccattcttcgtgacaccaatgctatcagcaatcttaacgtggactgcgattcgggtcggtttaatcccaatgttccccggaacgttggtaccatggacgacaccaccaatcatttctgggttattagtgggtggttggaagactgcattgtggcaagccttaatgttattaatgacgttctttacgtacttaccatttattcggaaacaagatcacttgaactatgcttcagaacaaggtgcaacaactaaatagggggaaaggtcaacatgggacaacttagaaaagattttttatggggcggcgcagtggctgctcatcaattggaaggcgcttggcaagcggatggcaaagggattagtgttgatgtgatgactgccggggatgttaatcatcaacgggggattacagatggtgtacaaccggggcacaattatccgaaccacgaagtcattgatttctatcatcgttatccagaagatattaagttatttgccgaaatggggttcaagagctttagaacatccattgcatggacgcggattctttcgaatggggatgaagcacaaccccaacgaagccggccttaaattctatgatgacctatttgacgaatgtctcaaatatcatattcaaccagttgtaacgctcttgcattttgaaatgccatatcacttggtcacggaatacggtggttggcgtaatcgcaaagtcatcgactttttcttgaactttgctgaaacggtcttcaaacggtatcgtaataaagtgaagtactggatgacgttcaatgaaattaataatcaagccaattaccacagccagtttgccttatttacaaattctgggttacagattcaacctggtgaagatgctgaaaaagtgatgtatcaagccgcccactacgaattagtcgcgagtgcaaaagctgtacaaattggcaagcaaatcaatcctgatttcgaaatcggctgcatgattgcgatgtgtcccatctatccactgacagctaaaccagaggatgtgctcaaggcagaacgcgcaatgcaaacccgttattggtttgctgacgtacactgtcatgggcgctacccagaatggctcttacaatatcaaaagaaccaacactacgatttggacattaccgcagatgatttgaaagaattggctgcagggacagttgattacatcggcttcagttactacatgtcatttgcaaccaaggacaaaggtgaaacaacacttcattatgatgaagaacacgatttagtgcctaatccatatgtcaaggcatcggaatggggctggcaagttgatccagttggcctacgttatgtaatgaactggttcaatgatcactatcacttaccagaatttatcgtggaaaatgggtttggtgctgttgatcacgttgaagcagacggccaaattcacgatccttatcggattgattatttacgcgaccacattgttcagatgaaaaaagccgtggaagatgacggtgttgatttgatgggctatacgccatggggctgtatcgatttagtttcagcaggcaccggacaaatgtcgaagcggtatgggtttatctatgttgataaaaatgacgacggaacggggacgttagctcgttctaagaaggactctttctattggttccaaaaggtaatcgccaccaatggggatgacctagcataatcatgaatagcgacgcaggcaaattgattttgtctgcgcctttttttgttgaaagaagcccatgcattattaataacccatttttctgaaataaaactgttattttatcgtgagttaacattaggcaattaccattatgaaataaattatgagaattagggcttatctaatgcaaaaataatcactatcgtttacaataagtaagtattaaaaatggaatggggtaaagaaatgacaattacatatgtcgtcatcaacatcgtgatcatgctcatcatgttatttgttttaaacaagatggcccggattcacgttaagtttagtcgccgcgttttcacggcattgggggtcgggattttattcggcgcactcttacagattatcttcaaagcagattcaacggttgtcaaacaaacagctgattgggtcggcattgtcggcaacggttatgtctcgttcttaaagatgatcgttatgccgttagtcatggtttcgattattcaagccattacgaacttggaatcatctaagggcttagggaagatggccggcatggtcattggaatcttagtctttacaaccttaatcgcagccacagttggttcagtgacagcggatgttttcggcttaaatgcgagtgatattcaatcaggccaagtcgaaaaggcgcgctcgaaagaattacaaacgaagctaggcgatgtacaggaacaaactgttcctgaaaaaatcgttagcttcattcctgaaaatccattcatggatatgacgggttcacgacctacatcaacattagctgttgtgattttctcagctttcttaggagtggcagcattacaattacggcgtaaaaagccggaacaagcagaaatgtttaataaaatcgttaacgccttgtacacggttatcatgcgcatggtaactttaattttacggatgacaccttatggggtgttagccttaatgacaacgaccgtagcacaaactaatgttaaaggaattctcagtctaggtgagttcgtgattgcctcttacgtggcattaatcatcatgttcttgattcacttcctattaatcacgttcactgggttaaatccaatcaactacattaaaaaagtgattccaacgttaatttttgcgtttacgtcacggacgagtgcgggttcaattccaatgaacattgaaacccaaacgaaacgtttaggggttgaagatgggattgctaacttatcggcttcatttggggcttcaatcggtcaaaacggctgtgcgggtgtttatccagcaatgttagctgtgatgattgcaccaactgttgggattaatccttggagcatcggtttcttggttaaattaatcttgattgttgcaatcagttcctttggggttgctggtgtcggtggtggcgcaacatttgccgctttaatcgtgctttcttcaatgaacttaccagtcgggttagccggactattaatctcagttgaaccattaatcgatatgggtcggacagccttgaacgttgatggctcaatgactgccggggttttaacggctcacttattaggtaaactggataagaacaagtttaatgatatgagtttgacggaagattcagacgaaatggcttaatttcaaaaaaatggagggtttagtgatgcgaacgattattatcggtgccacagctgccggaacaagtgcagctgcgaaagcaaaaagaacgaatccagatttagacattacgttatacgaaaaacgggactatgtgtcctttggggcttgtggcttaccttattttgttggcgagcactttgaagatcccaaccaaatgattgcccggacacctgaaaaatttgctcaacaaggtattgatattgcgcttgaacacgaagtactatcagttgactttgatgcgcaaacaatcgtggttcgggatttgaaaaccaatcaagatcgcacagaatcttatgatcaattaatgttagcaacgggagccacagctgtgatgccaccgattaaaaatgttgatctaaaaaacgtctatcatctacggacgatggcagatggacaagccttacgtgaattaggacaagacccaaaggttcaatctgtaacggtgattggtgcgggctttatcgggttagaaattgccgaagagttccatcaattagggaagcaagtccgggtcattcaactagaagaccgaattttaccactggcttttgatccagaactaacggacatgttcgcggatgacttatgtgataacggcattgaattacacttatcagaagctgttcaagccttagaaggaactgttcaggtgactggcattgtgactgataaggggcagtatgcgacagacttagtgattgtagcagctgggattcggcctaatacgcaattcatcacggatgatcgattgaagaagttgccaaatggtgcgattattgtcgatcaagcagggcggacatcgattgaaaatgtctatgccgctggcgataatgcaacggtcattaacagcgtgacgaaccaaccgatgtattcagcacttgccactggtgccaataaattaggccgaattgtcggcacgaatttaggcgggcaagccgctcaattaccagggatgttgaattcagccggtgtgaaattaatcacgctagaagcgggccgaacaggtttgactgaaaaagaagcggcagaggctggtattgatttcagtactgttttaatccacgacaagaaccaaacgaattattatccaggccaatcagatttaacgattaaattgatttacaccaaagcagagcatatcttaattggtggccaggtggttggtcaaaaagacgcagtgttgcgcgttgatgtactcgcaactgcgatccaagcgaagatgacaactgaacaactcgggttactcgaccttgtttatgcaccaccgtttgcaagaacgtgggatgcactgaatgtggccggcaatgttgcccattaattaaaaaaaagtgacaccgcacaaaccgtgtagtggcgctttttttgttgcatgcttaaacagttgttcatagtgtttacttgaatgtttactcgggtctgtgctaaaattgcatttagaaattaaatttttgcaaagttagttatgaattaattacgatgattaagaaaacacaaataaaaaatttatcgacaggagacagtttaatgaacaacacaaagagtttgattgcattgagttctggaattttaggggcagctgggatcggtttattgagtgcagggcaagtacaagcagcaacgacagcaaccgtcaactacgcagatggtgcaacaactgtttggacaagtccaacaactggtcaaactgctaaacgatacatctttaagggccaatcagtaaatcttttagcatcacaaaagattggtgctgaaacatggtaccgaattgggaacggcgaatgggtacctgaacgttacttaacaaccagtgacgctacaccagctgaaacaacaccagcaacagaagcacctgctgctcaaaagacagctcggattgcctatgccggtggcgcaacaactgtttggtcaacagcaacttatacagccccaacaggccaatacttaggttatggtcaaaccgtcaacgttgtgaaaacagaaactgtttctggcgaagaatggtatcaacttgaaaatggcagctgggtaccagctcgctttacaggtgatggtaagattgaagccacaccagcgcccgttgcacaaccggtagcaccagcacaacctgcaacagcgactcctgtcgaaacaccagctgcgccagcaccagttgcaacaacaccagcgcaaacagaaagcacgcctacaacaccagcacctgtcgcagaaagtgaatcaacaccagttgaaacgcctgccacactagaaagtacaccagctgtagcagaaagtagtgcgcctgctcaagcagaaagtacaactcaaacacaacaaccagctactcaagaatcatcagctcctgtccaagaaactgcaccagttgaaacaacaccagccccaactcaaaaggcaccagttgtaacgacaccaacaccagccccaacggcacctgcagcaacgactggtaatgcgcaagctgttattaatttagcgatggctcaaattggtaaaccttacgtttggggtgcccatggtccaagtagttttgactgttctggattaatggactatgtcttcagaaatgctgctggtaagagtatcggtggttggacagtccctcaagaaagtgccggttatgctgtttcattaagcaacttgcaacctggcgatttattattctggggttcacaaggtagctcacaccacgttgcgctatacattggtggcggacaatatattcatgccccacaacctggcgaaaacgttaagatcggttcaatgcaatactatgcaccaagttttgcacgccgtgtcttttaatgattgcaattaagcgaacatctcacctaggtgggatgttttttgtattttagccctaaataagctatgatatgtagagatttaaaaaaggactgacgagatgaagatagaagtacaagcatttatcaatcaaattcaagatcaaacatatttaacggatgaatacgagctccccacgccagatccttttgtggcggacggtattttggcacagttaaaacccgctattgataaagccattgaaaaacaagctttggcctctttttcggtgctgacagaatatgctggcgaacccgttaaggtgacattggaaacggggattgtgaatctaccattacaatacattaaaaaagtaaatcaattttttgaactcgacgaccaagcagaggtgaatctttatttatatgtgacatcgccactcattaatcgctcgaacatgcggattgacttaattgggacggtagcttcgtttgaagaatcggcagctgctaattggacgaagattgccgacttgctaacaaaggacttggaagccgtcgtaatcggttcacaggcgcctaaagaagaaccagtcgaaaagaaggcgcccgctaagaagaaagccgcacctaagaaaatggcaacgactaagaaaaaagcgcctgccaagaagacaacagctaaaaagacagctacccaaaaaacaacgactaagaaaacaaccaccaaaaaaaagactacgaaaaaagcagactaatttagtctgcttttttgatggcgtctattaaaggcaagtcgccgttaacaaacgagaatttcttgtggattgtttcggtcggatgttctaagacggtgcaaatcatcgcagcgacatcagcacgtgcaacttgtccaccagatggttgcattgtcactaggccggtagcttcgtcgtttgtaagtgtcccaggacgcaagatggtccaatctaaaccagagaattcaagccagtgatcggcatagtattttgcagcgtagtacggtttaatactttcaggccatttagttcgatcctcaacaaaaagtgcactgaccatgacgtagcgactaacttcagcaatcttagctgctgccatactcttaacggcgccatcgagatcaaccaacagtgtttgatcatcgcctgttttaccgccagaaccagctgtaaagacaatcgcatcatgatcggcaaatagtggtgctaaagccttaggttgtttggttaaatcgaataagacaggcgtggcccctagttgtgcaagttcatccgcctgttgttcgacacgaatgccggctgtaacggtgtgaccggcagcaacgagttggctaattaggagctggccaacgttaccatgggcgccaataacaaaaatccgcatagtaaaacctccaatataaatgtgtgtgctgtccattatagtagttattgaacagtgacgcaaagatagtggatttaaaaacctgtgttgtagtacaataaaattcggcaccttgcgaaaaaatgagtgtgctttagggtatataatcttgaaagtggctgatggcaacctttaaataggcaaagctaattgtgggattcgttttagaaataaatctaagaatcctctcattttttcacaaagttgcttattagaatatcatgaagccgtgtttgttttgtgttatggtacagatatagagattgtgatttattggataagtagtcctatttgttaatgctatctcagaaagtaggaggagaacatgacaaatcaatatcggagcgtttttgatatcattggaccgattatgattggtccttcaagttcacatactgctggcgcagttgccattggacatgttgctaatcgtctttttcatgcaccgattaacaaagttattgtgcgttactacgaatcttttgcacaaacccaccaagggcatggtaccgattatgcaattattagtggcgtgctaggattcgatccggctgatcaaagggtaccaatggcagttgatttagcgcgacgtcaaggtattgacgttgtcttcattgaagatccagggaatagtccggtgcaccatcccaatacagcggaattaacgttaatcaatcgtgagaaggaactaacgatttggggctgttcaattgggggcgggaccatcgaaatccgccaagtcaatttgaatggcattgtgattaaaacggatggcccgttaccattggtttttgtcgaatcggaacaagaaatcggcgatgctttagaccagatatttgaaggcaactatcgtgataagcgcatatcggttaaagtgccagatcggtttttgtataaaatcgaactgattgataagccgtacccggaacagattgaacaggtccgcggaatgagccaagacgttattgtgttatagaaagtggtgggaagatgtatacaacaattcacgaattagtcgagacagcgcaagaacggcaactaccaatctcggaattgattatcgaacaagaggttgcgatgagtcacactagtcgtgaagtcatttgggcaaccatggggaaaaacttggatgtcatgattgcggccgaagaaaaaggcgtgaccggtgaaggtgttcagtctgccactgggattacaggtggtgaagcggttctgttgaagcggtatcgggaaaagggaaagtcgttatcaggtgatgtgatgttgaccgctatgcaaaatgcggtagctaccaatgaagtcaatgcttcaatgggaatcatttgtgcgacgccaactgctggttcagcaggtactttacccggtgttttgtctgttattactgagcgcttggcgcttgatcgggatgcgcagattcggttcttgttttgtgcgtcagcctttgggatgattgttgccaataaggcgatgattgccggggcaactggaggctgccaagccgaagtggggagtgctgccgcgatgggcgccgccgctgcagttgaagctgctggtggcacaccacaacaatcgtcggaagcattcgcgatggcgatgtctaatctattgggattggtttgtgatcccgttgctggattagttgagataccatgtgttaaacgaaacgtgattggggccgtcgatgccttgaccagtgctgatatggcattggcagggctaatcagcaagattccagctgatgaagtgattggtgccatgaaacgaatcggtgaagatatgccatctacattacgtgaaactggtttaggtggattagctgctacaccaaccggggttgcattgaagatgcaaatctttggtaaggataagagccttaaataaaagcgacttttaggaggaacaattatgcaaaagaaactttcaaaatccgcatacggcggtgtttcaggtgagaaatatgtaccgtatgtcaaccaaggcgacaaaaaggtcggcaacttagcgattctaataatggggagcattttagccattatttttgctgcttcaacagcttattctgggatgaaggccggtttaaccgttgcagccgggattccaggttcaattattgggtctgggttagtcggtgcctttgccaaatcaaaagggattttaggcaagaatattatgcaagggatgtccagtggtggtgaatcaatcgccagtgggatgatttatgttttaccagctattattttaattggtggccacatcaacttcattcaaggggtcatcgttggggtgctcgcaattcttttttcaatggggacagcctcattagtgcacaactacttaatggttgaagaacatggtaagttggtttatccagaagccatggcgatttcagaaaccttagttgcgtcagatactggtggcgattcgcttaaatacatgggtgttggctttggtatcggtgggattattacgatgctaacttcatcagtgtttggtgtcgtcaacaacatgattagctacgttggttcatcattttataaatggaaattagacgttgaagtgaatccattacttgcaggaattggttttatcgttggattagaagtgtcattaacaatgtttgcaggtgcgattttatccaactttgcgattgcaccgttaatcggttatttcacagatatggcgggcaacagtgcgcatgtttggaataacacgagtttagccgtgaatcaaatggccgttaacgatttatcaagttcatacgttaaatacattggtgccggaatgatgctttgtggtggtttaatcggtgcgattaaattaatcccaaccatcgtgacgtcaatcaagaaaacactagctgccaaaaacgtagcaggcgaagaaaagaatacgcttggtatgattgccattgttgttggtggtgttgggatcttcgttattggtattatcattgcgcaaaacttcttaatggggattgttggtgcattactagcagccatcttaagtttactctttgtcattgtttcggcccgggttgctgggacgattggttgttctaacttgcctgtatcagggatgacaattgcgtcattagtgattatgacggtagtcttcgtattatttggttggacggacaataaccatacgcaaatcttattaatgttcgggacattcgttgtgaccgccgttgctgttggtggtggctacatgcaatctcaaaaagtaacatatgtcattggtggttcaaaatctgaaatgatgaaatatttcatgattgccgggattgtcggcgtaatcgtaactgtcggcacaatcagcatcttatcaccacaattcgttacagatagtgcaacaccagcctttgggttgccacaagcgaacttaattgctacattaacatctgggattatgacgggtaaattaccatggatcatgattatcgttggggttgtgatggcattagctttctacttcttagatttaccaatcatgaccgttgcaattggtttttacttaccaatttcaaccacttcaatcatcttgatcggtgctttgattaaagtctttattgaaaaagcaacgcgtgatgaagcgattaagaataatcgggttcaaagtgggattagtttatcatccggtttaattgctggtggttcaattattggtttaatcgggattattctccacgtaaccggtgtgttaaaagaccgcgtgattactggttttgcgaataccaatgcaatggggattatcttattggttgtcatggttgtttcgattactgtgccacttatgatgattcataaaggaggggcaacagaagatgggacgacagaaagcggagattgatttagaacaactcatctatgaaaaaaatccgcaagttcagtttaagttacaagctggccaggtcaccattattcggccgcagaatcactggattcaacggacattacggcgtttgcatgtgaagattccgctagaaacacagctggaacttgatgattatggtagttttgtctttaggcatgtgaatggaaaacgcagtgtccaccagattggccaagcactggcaggacagtatgatgaagccggtgaatacctgtatgaacgattactcgtgtatttgaatcatctagaacacacagaacatttgatccggcgggtaaccgactaagttttattaatcaattagtgaatcacatttttaagcttaaagtttcgtccaatatttggggttcacttcactcaacctctttttctatgcattatgatgatcacttgtttgtgtgatttgattaattttcgcgtgtaattcatggacttcagcttccttatctgctaacgctttatcaaatgttctttgattctttattttttctgcttcaaccgctgctttaatttgagcagcttgattgtcgcgtaattcagtgacttctttggtcatttccttttgtgctttccgttggctcaacgtgctgccagtcgctgccaagaaggtaatgatggcgccaatcaataatgacaccaaaataacgatgattaatggccatttaacatgggtgaatccaaagttaatggcgactggttcaacgtttaaaacagcaaaaattacgacaattaatgctaggaccaatactgtaattaatcgaccttgttttttcataaaactgccccccccctacttcttattcaataagttaccggcaacatagtctccgatatgtggtgccagttgatagaattgtgcaccgatcgccatcaaccatggtgcattaatttcacgttttgcatgcccgattgttttcacaatccgataagctagttgatcaggatctaaaacaacccaatcgaccgatttcaaataattaccggtcttatccgcaatatcaaagaaagctgtatcaatcggcccaggattaacggtagtcacttgaaccccaaatggttttaattctaagcgtagaccatttgaatagccaacaaccgcgaacttagttgccgaatagatggccgacttaggcgttgccatcttgcccgccattgaagcaatgttaatgatgtggccgctaccttgttcaatcatcatccgcccaaaagcgcgcgtcatgtacattaaacctagcacattaacccggaacatctgctccacaacggtcatggatgtgtcgaatgcattttcaaaacttccaaaaccagcagcattgactaacacatctggaatcccgacttcagtttgcacctgagccacaatggtttcaatcgctgctggatcactgacatcgaggacatatgcatacgccggctgtcctgaaagccggtgtgcttcttcgcgaaccgccgccaattcagcttctcgacgggccaaaacgacgataattgcccctttactagcggcttcataggcaattgctcgtcctaaaccagacgagccgccggtaatcaccacaattttacggtttaaatctctcaatgctgctaatttagtcatctgtttactcctttcgaccatgaaacggaatgtcatagatatctaagtcactaactactttcgtgtttttaaaaatatcgcgggcatcattttgtaaatcacgcactgcttgcccgaggtaccgggcagaaatatgggtcaataataaccgcttcacatgcgcggcttttgcgacctttgctgcattaatgttagttgaatggaaatattgacgcgcaatcttttgttcttgcttaccaaaggtcccttcatgcactaatacatctgcattagccgctaagcgttcaattggtggacattggcgggtatccccaataatggtcacaatccgtcctttttgagcatgtccaatgtaatctttgccatcaatttggcgcccatcagcgagtgtaaccacttctccctttttaatctttgcgtatacaggaccagccggaacaccatctgcatgcagtttctcaacttgcagttcccccggatggtccttttcaataatccgaaacccataactggcaatccgatgatccaatttagcacattcaacccggaaagtcgcatcatcaatcaaaacaccttcttcaggaagaatgacaaagttcaatggatacgttaaatgactttcagagatttttaaactcgtgcgcacgtattcttcagttcccttagggccgtaaatcgtaagtggttcgtcgccaccttggaaagatcggcttgataaaaagcctggtaacccgaataaatgatccccatgtaaatgtgtgagaaagatctttttaactttgcgcggttttaatgtcgtttttaagatttgatgttgcgttgcttcaccgacgtcaaacaaccacacttcatttcgttcatccaataatttcaatgcgacacttgtgacgtttcgttgtcgtgctggaactccagcgcctgttcctaaaaattctaattccatttagctcttccaatctgtctttaattcaacgctttattttgccgcgagggctttggtaataatggcggcatattcattgaccccagttgggttcggatgcaccttatcttggtagaaccagtcactgtgtttggcagcctgtgaataccaatcaatcaccgttaagtttggatactgtttagttgcatttttaagcgtctggttaacatcattttgccaaggacgcgttgggacaaacgcgttgagccaatagacttttcgcttagtcccaatggctgccataaattgcgccatctgttcttgcgtaaaggcgccatttgttcctagactgaccagtacagtatcgctaagggcttgtttttgatcataatcttttacaatttgaatactttgatagagttggcgcccaacagccgcatcaaccaacatattcgggaataacttctgtaaagcttgactaccgtcgagtaggacggaatcaccaattgcagtcaccgagatattctgggcccgttgaatcgtcacttgactcaagccatatttttcaaattcttggttgattggatgcttttgcgcagccgcctcagccgctttttcagcttttgaagttggaccatttgcttgtccagatttattctgggcttttgcttttttaatcaacgcatccttacgcttttggttagctttttgattttgcttaatattgaccgctaatgccgatttatgcgtatctggcgccggttggaatggcgcttgaaacgccccgactaacccgattaaaaagacaattgcgagtccagtcactcgaccaaccacccgattccaatgtggttggtgcataaattgcttcaattggtgccataactgcttgtacggatagtgtgctagtggctgttcaataaaccggtaggataattcggtcaatccgaaaataatcgccacttcaatcactggatataaaaccgggtgatcagcgatatttttgaagattatttcaaagaaaatcatcaccggaaattgatacagataaatcccgtaactccgtttacctaaccagttaaagaccggattcgtcaataaccgattccaatcagcgcctggatgagcgacaactgccactaaaacacagactaaagcactaaacagaaatagtcccccgcgatagacaagactactctcggcattcaacttaaccattaaccaaaccaaactgaggacactcactaacccgatgccatcgaggacgaggcgttgtttaggcacaatcttttgcttaagggctgttgatggccaaacaaacgccagcgctgctcctagtaaaattgaaaagacccgcgtatccgttccataatacaaacgactagggtcagcattgggttggtacaaaatggccatccagattgctgaaacaacactgactgctagtaatacttgggcaatccgatttttattcttaagaccaataatcaaggccacaacgataaaaggccaaattagatagaactgcccttcaatcgatagtgtccacagatgggtaaacggcgactcattattggcaaaccgatcgaaatacgactgaccatgtccaatttgccaccagttataaacgtataaaatgttcgtgataataatctgattaagttgctgtaacatttcccgctgaaaaagcgtgatgtacgcgcccgttgcaaacagcatcgttatcagcccagggtacaatcgttttacccggcgtaagtaaaaactttttaaattaatccattgattttgttcccactcttgaaccaacaaatcggtgattagataccccgaaaccaccatgaagattgggacccctaaataaccaccggtaaaagtatatggcatcagatggtataaaataacaccaatcacgccgattgcgcgtaaaccatcaaagccagtaatgtaacgactattctttaaacgcttcttgcccgccattttttcaacctactctacattctaataactgctattataacaatattttagtgatgtgcctacattaagccctgttattttatgcatcccatagaaaaaggaagcattcaaaaatgaatgtcttcctttcttgacgtgcctattattcgacaaattcaaacgtaaagttatcaattgccactaaatcaccatcatgtgcgccactttcgcgtaaggcttcgtcaatccccattgaacgtaattgacgggcaaaacgcatgacaccatcttgatgatccaagttactcatcttgaagagtttttcaaccttgtcaccagacacaataaacgtgccgtattcatcttgttcaatgatgaaagcaggtgcttccggttgatattgataaagtttttgcgtttgaacttcttcgacgtctcccattgggaattcagtcgtttcagctaataagtcagctgtcttgttcatcaatgattgcaccccttgatgcgtgatacttgaaatttcaaaaatctcatgtgtatcgccggcagctgctaatttttgtttaaactcggctaataattcagaagaacctggtaaatccatcttagtcgctacaatcacttgtggtcgttctaagatttttggatcataggtctctaattcgtgattaatttgttggtaatcttcaaatgggtcgcgacccgtttgatcgtccatttcgattaaatgcaagacaacccgtgttcgttcaacgtgccgtaagaattgaatccctaaaccaacaccgtctgaagccccttcgattaaccccggtaaatcggctaagacaaagtcccgaccgtcatcgagttgcaccatccctaagttagggaccaacgttgtaaattggtaactagcaatcttaggtttcgcacttgtcaccactgacaacaacgttgatttcccaacagatgggaaaccaaccaacccaacatcagcaagcacttttaattcaagttgaatgctgcgttcttcaccaggttcaccgttttcggcaacttccggcgcactattacgggcatttgcgaaatgcatattcccacgaccaccacgaccgcccttagcaatcactaattgttggccatcttcggttaaatcaccgagtaattcattggtttcagcatcgcgcaccgttgtaccaggtggcacttgaacaaatgtatcctcggcaccgcggccgtacatttgtttattctgaccattaccaccactattggctttaaagtgatgacggtaacgaaagtccattaatgttcgtagaccttcatctaccactaaaatgacacttccgccccgaccaccatcgccaccggctggtccgccaagtggcacaaacttttcacggcgaaatgcaactgcaccatcgccgcctttaccagctttcacatcaattttgacttgatctacaaacatattttgactccttctcatcgttaaacagtaccttatatactaccgaaaaaaagattaaaagtaaacagataactggttaaacactgaattggctctatcatcgataaaaagcgcactgagtgagtgacctcaatcagtacgctttttattcgttaattaatggctagctggcaccaatttaaattggctccatggtttcaaatagtctaataggaataattctgtaggcgtaatacggccaaccacattcacgcgcccgtcatttggcatggctttgagggcaatttgggtttcccctttatactgaccgtaaccgacgttatcgattaaaatatcaccgtgttggatgtcaactgtatggtgggctgggaaaagcaggtctttaaaaatgacccgtgtcatcgttgaccgtagaagatattctgaacgatcgccacgataactatgcagactttcaaagaggaccttgcgttcatcagccgtaatgtcatctgcgacgtcgattgcgattgctgggaattcagcgttaaagacgtcatgcatcgtcttcaattctgcttccgaagcatacgcattaccgacaataatgtcatcaatgttatccattaaaacgtaatgtttcatctgcgttgccatcgttaaatcgcgatcaacttccatcgtgggcaacccatcttgtgttggccatggtccgaaagtcgcttcatgtgaattgacaaacgctgctgtattcaaattgtattttgcaaattgcgccgtacattgtttgaagaagtcttcacctaatcccgagaaccgatgtggatagaagttatgacaacctaacaagttttctcgtttgggtgaataactcataatgttatcaacgtaacttgtcccttgactcatattaatttcaatttttaaattaaacggattgcgcgtcatttccgcttcttcttggccggtaaaaccgttgtccaaccgaattccccaagcaccaagttcatggaaaaaacttaaattatcatatgaaataccgagttgcttgaacaaacccggattgatatcaatcatgacttgcattcctaattggttggcatgggctacaacccgtttaaagttgcctaacacggcttcttgatcgccagacacctccaataatgatgtaaagacgcgttggaacccatattgatgcgctaaatctaagtaagccgcatccttttcaaaagttgatcgttctggataaattgaaacgcctagttttcccatgaatagaacctcctaataattgggctataccaccctgtcatctattagtctagcataccttaagcacttttgaaaactcttacattacttttaaactggtctatttctggcattgtccgcagtttgctcactaacgcaccaatctttttttcggtctatatcagcgttttgatggtttttgaacgtttttgaaatatttcgattgcttttgaatggaaacgatgtcataatgatgctacggaggttttgtcatgttaacagaagaacgtcaccaagcgatattacaacttttaaagcaacaagacgtcgttaagatgcaatctttgtgccagttattgaacgcttctgaatcaactgtccgtcgtgacttgcaattgctcgaagaacaagggcttgctactcgaattcacggtggtgctaagcgcatcaacacgttacaagaagaacttggccagattgaaaaaaacggcaagaacgttcatgaaaaaaacgcgattgctaagtttgccgcagcacaaatccaacaaggctgcgtcatttacttagatgctggcacaacgacccaggcaatcatcccctacttaagacctgaaatgaatttgacggtcgtcaccaatggggttgataccgcttctctcttagccgatcaccaaattcaaacctttctattaggtgggcgtgttaagagcaaaaccaaagcgatggtcggtgcggctgctttagaaacccttttgcaattccaattcaatcaggcgattcttggcacaaacggtatcgatgttgaagctgggctaaccacccctgatccagaagaagccactctaaagcgctttgcgattcaacaagcgaaccaaacgatggttttggcggatcacacaaaattcgacgctgtttcgttcagtaagtttgccccattggcacaagtccaattgattactgatcaattgtcaccatctgtttacaaacactatcattcacacacagaaatccaggaggttttatcttgatttatacgattacggcgaatccatcaatcgattacgtcattcaacttgaaaaactaaataccggtaacgtgaaccgcgtccaatctgacgttaagctccccggtggtaaagggattaacgtttcacgcatccttgccgaattagcattaccaagcgttgccctcggctttgtcggtggcttcactggtcaattcattcaaagcaaactcaacaacgcttcgatcgactgtcgattcactgaagtcgaagaagacacccggattaacgtgaagttaaaagacaatactgaagaaactgaaattaacggtcaaggcccacacatttcagcagaagccgttgccaacttgaaacaacaactgactaagctggaagccggcgatattgtcttcatgtctgggagtttgccacctaatttaccggctagtttctacaaagacttaatcccattgattcaagcgcacaacgctgaatttgtaattgatacaaccggtcaagctttgttagacacattggctgaaaaaccattggtcatcaaacccaaccatcacgaattggccgaactgttcgacacacactttgccaaccaaagtgaaatcatcgccgctggtcgcaaattattagaccaaggtgcccaacatgtcttggtctcaatggccggtgacggcgcccttttaatcacaccagaccacgcttacctcggtagtacacctaaagggacagtgattaattccgttggggctggtgattcaatgatcgccggttttgtcggcacattcgcacaacatcacgatgcactcgccgcttttaaaacaagtcttgcttgtggtagtgccaccgccttttctgaagatttagccactagcgctaagattaacgaactcttacctcaaattgaaatcacacaagttgattaattttaaatacaaaggagatttattatgaacatccaagatttactcttaaaagatgcgatgatcatggatttacaagcaacgactaaagaagccgctgttgatgaaatggttgcccgctataaagacatcggtgttatcacagatgacgccctctatcgtaaagatattttggctcgtgaagctcaatcatcaactggaattggcgaagggattgcaatgccccatgcaaaagacagtgccgttcaacgcgcaactgtgctattcgctaaaagtcaaaacggtgttgaatatgacgcactagacggccaacccgtttacttgttcttcatgattgccgctccagaaggcgctaacgatacgcatttacaagccttggctggtctttcatcccttttaatcaacccacaattagtcgctgatttgaaacaagcccaaacaccagaagacgtgcaaacgctctttgctaaggctcaagctgctaaagacgcagaagatgcgaaggaagaagctgaagaagccgctaaagcacaagccgcagccgcaacgccagctgatgatcaaaaaccattcatcgttgctgtcacagcctgcccaactgggattgcccacacttacatggccgaagctgccttgaaagaaacagctgctaaaatgggcatcgacattaaagttgaaacaaacggttctgaaggcgttaaacaccaattaaccgctgacgatattaaccgcgcaacaggggttatcatcgctgccgacaagaaagtcgatatgcctcgttttgatggtaaacatctcttgaaccgtcccgtgatcgacggcatcaagaaaccagctgaattgattcaaaaaacattggatgaagaaggctcaatctatcacgcaactgaaagccaatcaagcgaagaagcttcagctgacaagaaaaccctttggagtcgcatctaccaagatttaatgaatggtgtttcaaacatgttaccattcgttgtcggtggtgggatcttgatggccatctcattccttttggaacaaaccgttggcgcacattcaaccacttttattttcttgaactcattaggcaataatgcctttaacttcttaattccggtccttgctgcttacatcgcgatttcaatcggtgatcggcctgccttaatgcccggatttgtcgggggctacatggctagccaagcaacagccagtgtccttgcttcaaagagtccagccggattccttggcggtttagctgctgggttcatcgctggttgggtgatcgttggtttgaagaaagtcttcaagaacttgccacaaacccttgatggtttaaaaccaatcttaatattccctgtattaggactattgattgttggctttattatgtacttcatgatcaacccagtctttgctcaaattaacctctggttgagtaccttcttaacacacttaggggctggtaacgcattactacttggtgcgattttaggtggcatgatggccgttgatatgggcggtcctttcaacaaggctgcttataccttcgcaatcggtgtcttcacaaccaccaaagatggttcattgatggccgctgtcatggctggtgggatggtcccaccattggcaatcgcggttgctgctactattttcaaaaacaaatttaccggtagtgaacggaaacaagccttcgcaaactatgtattagggatttcattcattactgaaggtgccattccatttgctgcatcagatccgttacacgtgattgtttcaagtgttatcggttcagcaatcggtggtggtttaacccaattatggcaaatcactgtccctgcaccacatggtgggatcttcgtggcaccacttgccaaccacggcctactctttgtgcttgccgtgttaatcggaacatttgtcagtgccctaatcttaggcctctggcgtccagtggcaaaagaagcttaatttaaaaagtcgtagtcaaatgactgcgactttttatttatcttgaaaatcagtattgtgcttttgtttccattcattaatgtaattcaaacgttgtttcatccgcgtttcattgccttgttcggtcggccggtaataaatatggtcggcgatactctctggtctagttggcatcgtggtcaatctatcatcgtagaaatgtgcgagttgatatcctttgccgtaaccgacttccttcatcaatttcgtcgccgcattacgcaagtgcaatggcacgggttcatcaatcgtctttttaatatccttttgcaccgctgtccgcgccttataagtggcgtttgatttcggcgcaagcgatagataaatcacgcactgtgttaaatgcacgtcgcattccggtaagccaatcgcctgacaagcttgaaagacgttcattgctaaattcaatgcattgttatcggccagaccaatgtcctcactcgcaaaacgaacgagccgccgagcaatataaatcgggtcttcgccgccgtcaatcatccgccccaaccaataaatcgctgagtcgacatcactattgcgcatcgacttatgcaaagccgaaataatattatagtgttcctcaccgtctttatcataataggcggtttttttatttagcagttcccccaatagatcgccatcgacggtcacttgatggtcttgcacatcactattaataactaacatttctaaaatattcagcgccgtccgtgcatccccattcgaaaagatggcgacttgcttcaataattcatcactgatatgaaccgttaaatccgggaaggcttggggcgcctttaaaacccgttgtagcaactcaataatgtccgcttccgtcaattgctttagcacaaaaacgcgtgaacgtgatagcaacgctgaattgatttcaaacgacggattttcggttgtcgcaccaattaggataatgctgcctttttcaacatacggtaaaaaagcatcctgttgcgccttgttaaaccggtgaatttcatcaataaagacaatcgtccgctcacccagttggcggttttcttcggcttcattcataatcttccgaatctctttgatcccattcatcgcggcactaaacgtgataaatttcgaagccgtcttgcgcgcgataatctccgccaacgtggtcttcccaacgccgggtggtccccagaaaatcatcgaagtcacttgatctttatcaatcatttcgcgtaaaaacttgcctggtccgactaaatgcttctgaccgacaaaactgtctaaatcagacggtcggacccgattagcaagcggcgcattcatcgccatctcttgatcaaacaaagaggtttgtcccattttttcaccccactttagttgttgttaattgaaacttcttaaaatgtgcccgtaaataacttaaggttaaactctccgcgtctgaggcaacaagctcaaatggtgcacccatcgccatcacttggcccccttgactaccacctttaggccccaagtcgatcaggtaatcggcattggtcatcaaatcaaggtcgtgggtaatcatcataatggtggcacccttggattttagctggttgatgacgcctactaaggtttcaacatcgcgcggatgcaacccaacagaaggttcatcgaagacgaataaagtgcccgcccgttttttattcaaatgcgttgcgagttttaagcgctgtgcttcgccacccgaaagactcggtgtactttcaccaaggtgtaaataagctaagccaatttctttgagaatcttaagttccttttgaattgctggcacatctgcaaagaccgggattgcttcttccaccgataaagccaatagatcaacgatgctatagccttgccacttgatggcttcaatctctggtttgtagcggttaccatgacattctggacaggtttcttccatgtctggcaaatattgaatatccaaaataatgctgcctaacccaccacagttcggacaggcgccttctttattgttatacgaaaagtgcgcgatcccataatgatgcgcttgtgattctggtaaaccagcaaataatttccgcagattgttcatgatactcgtataagtcgcgagtgttgagcgtatattcttaccaaccggcttggcatcaatgctgacgactgacgttaaatcggtcgtcaactgggtgccctgctcgggtaattgctcatgttggtggtgcgcttcaattgctggcactaaactatctagaatcaaactcgtcttcccggcgccggaaaacccagaaaccgccgtaatttggttatctggcactttgattgtgacatcatgcagattaaaatattggccaaccgtcatcgttgtctgctcaccagtcgttgcggcagtgactttaggatataagatgttcgctcgaccagcgatatagtggccaatcagggactgtggattctggatcaaatccgcgggtttcccttgggcaatcacttgttcccctttgcgcccagcttctggcccaatttcaatcacccaatccgcttgactgatgatattcacttcatgatcagctaccactaacgaattgccttgtgccactagctgccggaaaatatgaattagcccttcgacgttgtcaggatgcagcccaaccgatggttcatctaaaacgtacaacacaccagttgtcgctgttcgcaacgtccgcgccaattgaatccgttggagctcgccagtcgacaatgtattcccattgcgcgacaacgttaaataatccaaccctaattctagtaacggttgcagtgttcctaataggttcttaaataaaattgtcgccatttgctgcatttcatccggtaagtcggccttagtagcacgcacccaatcttctaatgcgcctaacgtcaaattagaaactgctgcaatgttttgtccgccaactgtttgggtcagtaatgccggatttaaccgggtcccatgacacgttggacaggttgaaaaatggaaaaatgaattgactttagccattgcccgatcacttttaaccgattttagcgattcataaacagcgtcataagcattttcatagagggtattctccgtactaaacacacggcccgttgaggtatggaaatcaaccgcatacttcgcccgtttaccatgcaggacaatttctttttccttggccgtcaagtccttgtaagggacatcaattcggaccccaatgtgggcagcaacggttggcatgaaattccggcccggcaatcgccatgaggcaatcgctccgtcttcaatactgagattttcatccgcgatgattttgcgatcatctaacgtttgaatctgccccgtcccatgacattctgggcaggcgccagctgaattaaaggcaaagtcttcggccgatttagccataaactgcacttggcaagtagggcacgtaataatccccattttatcgccagctaagtccatcgcttgggcaatttttagacttggttgaatcacgtgcccatttggacaacgtgtcgtccctaaccgtgaaaaaatcaatctgacgacattaaaaatctcactcatcgaaccaacagttggccgttctgatggcatacttggtcgttgccgaagtgcaatcgctgatggaatatgccgcacttcttggacttgtgagcgtttattctgcgtgattcggcgccgcgtgtacgtcgacaacgcctctaaataacgccgtgagccttctgcatataaaatccccatcgcaagcgaactttttcctgaaccagacggtcccgaaatcgccacaaattggttcaacggaatatcgacgttaatatttttcaagttattgacgttcccgccacgcacttcaatctacgttggttgttcaattgtcattattggttcgctccccttttgcttgacggttaaaaacggccgcctctgcttctaaattcgctaaaattcgttctaaatagccgtcaacagctgccacttcagcatccgaaaagcccttgtaaaaaacggcgctcaatcgttgactaacgtcatcaccgacctgttgctgattagcgccttgttcagttaagtcaaagacccgcttgcgcttatcaagtggcgattgctcactcatcaataatccctgttcttctaagcgccgtaacatcaacgataaactactattggctaagccagtcacttgtgccaattccgtagcagtttgcggatgatgatcccacaatgctgacaaaattttcccctgttcagcgttatagcacgcgcgtggatcagccgttaaataacgattaaaaagtcgggtatttaataagcgaatcttcaaagttaaataaccaccctttttggttttcatcccgtccactcctaaattgtttttatatcagcattaattatatcttactatataaaactaattttagcgagtaaaaaacaccatggtcaaccacggtgtttctaaagaagctgtttcaattgttctgcttggacactgcggacttcttcgactactactagcgcctgcttgtcaatcgttgagaccaccggtacgagcgtcgcgagttgtttggccgtacaaatgacatacagcatcggccggtcattttgactatagtacccttgcgctttaatgatcgtgatgccttggtggaattgcgtcgacaatgtttgggcaatcgttgcatattgatccgaaataatcgtcaccgcgcgttttgccccaaatttagccaataatttattcaaaacgactgctgataaatacaattcaataatcgttaagagcatattttggaagccgataatgaagccggatggaatggcaacaattaaatcaaaaaaaagcatcgcagagccgttttggatccctaaatagcgattggcaatcttcgctaagatcgtactaccagcaatcgtcccttggcaatgaataataatcgccattgcaatccccatcaagacgccaccaattatcgtcggaatgatcgtctgtgtcgtatggtagccgataaaatgcgggagccgcaagaagatagaaatccagagtaccgcccagaccgaataccagatggtttgcttctctaaatacttaaagccgacaatcactaataaaccgtttagaaccaaattcgtagcagctggcggaattgctaacgcatagtagccaatcgccgttaagccagtcacgccaccttcaccaatatgatgaggaatcaggaaatcattaatcgccaccgcataaatcaaggcgccaatgataatcccgagaccatttttaaaaagtgcttttttctgcatcccactcacgtcctcgttcaaactaacataagcgtaccatatttagggtgggagattaaagaacaattgattaactattaatttacaatactctatatttttcctgtgctaagaaaccatttacttactttagaacactctgccagtcattacttgaagcccatccattgtatatacttccacaatgtccctatcaacaatcagcaatacatcatcaatatttcctgtaatttgacgcctttcaattttcgatgttgcccattgacgtctttcaaatataaccggtcctgatactttttcaagacagcattttgatagatttttattcgcgcgttttataatcaagttagccaaatacttttagctaattgataaaataaaaaacaccaagacaaatctctgttatcattgatgttcctacacaaacaatgaaagaggttattgtcttgatgcaagaacagaataccacagtcagaaaaaaaggtcagcacctaacttcgtttaaacgaggcagaattgctacgctgcacagccaaggctattccaatcgtgcaattgccagagcgcttaatgtttgtcatcaaacaatcaataatgaattgtgccgcggcgagatcgaccaagtaaaaaaagtgaatggtcaacgccaatattacgctgtatactcaccagaaacagcacaagctaagtacgaagctaatcgagcccactgtcatcgacctttgaaactcgttatatcgaacagtttgtccgtaattccatcataggagccgctcttgcaacgtctgttgagcgcaagacacgaaagtatgtcgcctataaactgagagatcatacaagtaactctatgtatttggcgtttaaacagttaatgaaggattttaagggagctgttcattctgttacatgcgatagaggtactgagtttatcaatcaacaatatgtgtcagaactagaagcatctggtttatcactatactttgcccatgcttacagtccctatgaacgtggatctaatgaaaatcataacggcttacttcgagaatattttccaaagggaacagacttcagtaaaatatctcactccgaattaaattatgccgtagagagcattaataatcgaccacgtaaagtcttaaactggcagacagctaataccacatttaaacttgtatcaaccttaaacctcgtgtaagcttaaaaaaaaaagcaaatgaactctaagcttatttaagtagcaaaaaaattggtataggtagttatttaactctattttgatcaatacaaaaaaacagatgctttcaacacttcaaaagcaacactttttagaattaaacatcagattgatttaatagaaggtaattattaaaggtataagttatgtatttttatataacttatacctttaataattgacttattttttgatataacttatactttatatataaaatacagatggaggtttcttatggcaactacattaactatcggtaattttaaaggcggtgttggaaagaccaagatggcgacaatgcttgcattcgacaatgcccttatcagaaacaaaaaaaccttagttctagatttagatcctcaaggtaacgcaacaaagatcttagctagaacaggtggtctttcaaaaattcaatatactatcacagaccaaattattgatcgccacagtaaaagatacacagaaacattaaaagcactcgcacaagagtctccagataaaggtattcaacaactagaagcagatccacgcgctattatatatactttaacaccagaggaaagagcagtctcactggaccaatgtatctataatattcgagagaatctcgacatgattggctgcgacactgcatttagaaactttcctgcatttattcgcacgtattcaaacgacgagcaagaacaagtacgttttattgcaaatctaattaatgatttaaaaaaacaatatgatactattttcattgatgttccaccgactatttcagaattttccgataacgctatggccgcatctgattacagcataattgcttttcaaacccaagatgaatcctttgatggtgtgaataaatatattggctatcaaaactttatggttgaacaatttaatattaatcttcaagttattgctattgttgcttgtatggttgaacctgatgataatcttgatcaggaaatttacaatgaggccaaagaagcgtatggagatgtcgttgctgatactatcattacgcaccaaaaacgacttaaaagatactcaagagaaggtattgatttaaaaacatataaaaatggtaactttgatcaatgggacttcaaagctcataacggattcaatgaaattcttggagagattgaaagtagagatcaatatttgaaatcattataaggagtgagctaaatggttgtaagacaatttaacactgacaatacagaagaaaaaaaattcacacgattactaaataagccacaatcaaaagttcaatcagtagaaattgccggcgaatattcatttggtaccggtacaacaatgaatagtagaaaagcaacatctaaaacaacaacaccttcttctccagcgttagaaaaaggatcaaaaaagcaaggtcgccctgttgaaataaaagatgacagataccaggtaacacgtcctaagaaaatatcaccagctttagaaagtaaattatctctattgcaagattatatgacagaatttgctactacaactaaaagaatatcatttgataaacttgttaacactttagctgattcctatatagatacgagacttggtatggctaaaagcgaacacttaaaatcagaaattgctgctgaatttgagaaaataaaaaaataaattatatttatacacaagcaaaaaaggtataagttatacacgttctaaagcagaaagggtataacttataccttttaatttgttgaatatcacttccacagcaacaaattaaccaattccaaaaacttataacttatacatttaatccatttaaagtataagttacatctagtaaaaccgagtataacttatactttaattatagttgtcccttgctatacttcgatataaatgttattttcaaatagtaaataaaaagccatcacgaacggtaattcgtgatgacccactttaagaagttatttgactgtaatttcttctaaactatgtctttgattataggctattttgttcaaaatagcaatataaaaaggcttgtttgagtatacataaaagtaggtcgtgcggcttttcaaaagagattctggtttaaccaggctcgcatttgcctactctaaaaacactagagcggactcgcaaatgcgggttcgctctttttaattgataaggagatctaacatggataatcaactgaactattacaacattaagcgggaatacgcacttaaattcttccaagttcctaaggtctttatgacaaacgacaaatataaaaaattgagtgctgaagcaaaacttgctttcgccattctttctgaccgcctccaactttcaatcaaaaaccattggttcgataaagccggcaatatttattttatttacactggcgaacaactagagcagattcttggttgcggacactcaaaaatcacttcaatcaaaaaggaattaactgaggcccaattattagttatgaaacgtatgggacaaggtaaagcaaatcgtatgtatttacttggaccggaaattactgataacgatatttatggcatcgatcaacttgaaacagctgaaaatccactcgcagaagaagttgtaaacattgatttaccaacatctatgaatgatggacagcctgaaacccttgataaatctagattgctgaaaaacagtaatctagattaccgaaaaacggtaactagtgatactgatattaataatactgaatatcttaaaaccttaaatacagatactaaaaaaacagatactctaacggacagtcctcaaaatatcaagcagctacaagacgctgcgctgtttgaagtgcaattagaaaacgacaatatcttttctaaacaacaacttttagccttaaaactcttatcaaacggagattttgaattgttttgtactgttcaaaaaacaattctacgtgccaaaaaacaagcattaaacagtcatcagatacaaagcagcttgtttgatttacaagacgaagacatcgaccaacctgtttatgatgccttaatgcgaattgtccaacaagtacggttgggtgcaatacaggatttaaatagctatgtatttagcactatgtttgatcagtttgagcaactaggcagtaaacgtgccataacagcatataaaactagtggggcaactatcacctgggagtaacttttaaggcgctatcaggctaattattagtacccagggtaatttttattaaatttcatgttgcaacttaattgtctgctatgtcatgatgtacacgaacaaagcgaacaagggttcgtcaaaaagggttaaataccgtatatacaacgtttgaaaaacataagaagctttattttcatgttaaaaatttaattaactaaattcataattgttagcggttaataaattgtatgatttgttaatttattaaaatttgtcgttaatcggcatttagtttaaatttacaaaaatattggaggtagtagcatgaatacgctatattttcacgccacatttgtcacttagttcgtgaattgcaaaataaattcttaaaatttatattgcaattaaaaaaacttaatggtaggtattaatgtatggcgagcaatacaagcatttaagcaatgacactaaattagcctatatggtactaaaagaccgattagagtattctttgcgcaataactgggttgatagtgaaggacacgtctactttatctttaccaatcaagaactaatggacttgttcaattgttcaaagggaaaagtcatcaaaataaaagcagagttggaatcaatcggattactcgttcagaaacaaatgggctttaacccgaaaactaagaaaaatgaaccgaatcgcttatatctgtccaagctcgatgtgaaagcaaccgatgtctatttacgcggcgaatttggtcaaaaaagctctcaaacccttgctacgagcggaagttcaaaaaatggacttaatctatatagagaacctaaagaaagagacaaaaacagatgcaatatagatactcaaaagttggacttttccacagccaatttctcaccagcagaaattcaaaaacaaaaccaggatctcataaatcatgctaatgacttcttaactgatgaagacagtggcttacccgttttcttagaacccgaagccgtgcaactacttagtttttggtgccgtaccccgcaacaaatgcggcgcttcattggtattatcttaaatgctaagtaccgagttgaaaaggatcatcaagatattggcgtcataatcccgctttacgacgaagaactaaaacctttgatgactaaagccttaagacgctactttaacgccctaagaagcaatgaaaagcatatcaagaacgtggaaaactacttgtacggcaccatgcaaaacctatttggcgtttggtggaataaacaagcggctagagaatatgcggccaaacaccccgaagaacagaacactgacaatgagcgttcttgaaattaaacgtcatatggactcatttaagccgttttaagtgttgcatgcataattatattaaaactgctttaaaatcgtttagaagtaaaaataggtgccttaagtggttgaacaggtgatgactgaactaagtgaaagtgaagggagctttttaaataatcaaaccaagcaaagaagtcgaaaaaatagagcaattgttggctgacccctggacagtcaatatttaaggcatttgggaacaagcggcacataatccagaccctgataagcgcaagttgtttgacgcgttacacacttacctcttagataaacggcaagaaaaaaattatcaacgaaaagcatttcgtgatttaacatggacgagtcaaagaatcagtggttggaatgaaaaggaggcacaaaatatgactaagacacaagcatatatggacaagtatcaatttacagttgcagaaaacaaacggtttgctcgaacaaattttaccaagctagtacacactagtgcccgctttgaaggcgtaaataccactttgccgcaaacacaaaccattatggacggcatgagtgtggcaggcgttcctgttgaagatattttgacaattgttaacttaaagcgtgggtggcaatatatcactgatcaaaattcctccttaacgttaaccatggaaaaacaaattaacaagattgtggccgcggaagacgccttagtaccaggagaattacgacaaggaaaaggaggagttgatttaggcagtgaagacttttttgaaccacccttaattaacgaaaaacaagaacaatcctttttacaaaaaattttggctgatccgcaaacaacgaccactgataaagcattgactgttatgtatcataatatgcgccaacaaatcttttgggacgggaacaaaaggacggcgactttaagtgctaataaaattatgattgacggtggtgcaggcttaatcaatgtgccgttagataagtgggatcaatggaacgaactaattgccaattattatcgaactaatgacatggctaaaattaaacggtggacatatgacaatggcattcaaggattacaaattagagcaaacttagagcttaaatcagttgaagacgaaattggtaaaagaatccaagaacaattaaaagattttgcggatcaaaacccagaaattaagccaaaaaatgatccagaaaataaaaacgatcggcctagttattaggttgatcgtttttgagcttattcggcttatgggcattaacgtaatcggcaaatgtttttaaaagctcttcggtttgttcaaccgaaaggttatcagcttgaaagtatttttctagcaaagctcctttttgaattaatcggcgagaacgagctttgcggtcttgccgactttcataatatttagattgccgtaatttaaaatcttcccgctcaattttttgttttaaacgcgcttgctgctcgactagtttttcatattgattagacatagaatttccccatcgcgtatggttaatgatctacggactttacctttaaaaattcagaaaattgcttagctaaaagcttaatctgatcgttagacaaattagcataatctaaattggcttgactgatgatttgtttacctagccgttgttcaatcttatttttttcgtccttaattttttgattaagggcttttaatttagcttcttgtttttctaagttactttgagacataatgatccctccaatcatatttgaaataatcaccgaaactatatcatataggaaacgttaagtcaaagtataaaagttgaaatagcgaagcggaaggcatacactaaaagtaaattcaggataatcagcagaccgagtgaaacgaggtcaatgcgcacttacacacaacaactaaagttggttgtattattgtgctaaacccttgtatcagaagtcgccgttggcgacaacaaaagcaaacccataaacctaaagaaaggtggtgaccgacatggcaatttttcacatgagttttcaaaatattagtgctggtaaaggacgtagtgccattgctggagcaagttatagaagtggtgaaaagttattcgatcaaaaagaaggtcgaagctatttttatgctcggtcagtcatgccagaaagctttattttgacaccaaagaatgcgccagaatgggcgagtgatagagagaaattatggaatgaagtcgaaagaaaagatcggcgagcaaattcacgctatgcaaaagagtttaacgtggctttaccagttgaattaagtgaagacgaacagaaagaattattgacaaaatatgtacaagaaaattttgttgatgagggtatggttgccgacgtagcaattcatagagatcacccagataatccgcacgctcatgttatgctaactaatcgtccatttaatccagacggaacatggggattgaaaagtaaaagggaaaatatattagatgaaaatgggaacaagacttatacaggaaatagtcgttttccaagatcaagaaaggtgtggctagttgattgggataaaaaagaaaaaattactgaatggcggcacaattgggcggctagtgtcaatcaagttttagagcaaaaaaatattccggatcggatcagtgaaaaatcatttatcgagcagggaatagatgatacaccaactcaacatgaggggatcaatagcaagcggcatgaaagaaaagaatttaaccaacaagttaaggactatcgtaaggccaaagccagttataaaaataaccaagaaaaagtaatcaatagaggtcatttagatagcctaagtaaacacttctcgtttaatgaaaaacgggtagttaaagagttaagccatgaactgaaaacttatatcagtttggagaacttagatgataagcggcgcatgctatttaattggaaaaatagcaccttaattaaacatgcagttggtgaagatgtgactaaacaattattgacaattaaccaacaagaaagctcattaaaaaaggcagatgaactcttaaacaaagtggtcgatcgtaccacgaaaaaactttatccagagcttaattttgaacaggccacgcaagctgaaagacgagaattaattaaggaaaccgaaagcgagcaaacagttttcaaaggcagtgaattaaacgaacgtttaatgaatattcgtgatgatttattgactcagcaattattgacctttaccaagcggccatacgttggttttaagttattaatgcaacaagaaaaagaggccaaaattgatctgaaatatacgctaatgatccactctgatagcttagaaagcctagaacacgtcgataaaggactactagaaaagtattcaccagcagaacagcaaaagattactcgcgcagtcaaagatctacgggcaatcatggccgttaagcaagtcattaaaacgcaataccatgaagtattgaaaagggcctttcccaaaggtgatttagatggattgccattgattaaacaggaacaagcctatacagccgtgatgtactatgatcctgttttaaagccatgtcaggccgaaacgattgaacagtggcaagcaaatccaccacaggtgttcagtccccaagaacatcaacaaggactagcttatttatcgggacagcttagcttagatcagttagagaatcatcacttacaacgggttttaaagcatgacggcactaaacaactctttttgggtgaatgtaaagtcgatccaacgattaaaaacagtcagatcgagaaaatccaaaaacagttaaaagggcaacaagccaaggacgaccagtacagaaaagcaaatatcggacattatcaaccactgaattacaagccagttagtccagactattacttaaagacggcctttagtaacgcaatcatgaccgccctatatgcccgtgatgaagattaccaacggcaaaaacaggcgcaaggtttaaaggagactgagtgggaaatgacgaaaaagcaacggcaacaccaaactcgaaaccggcatgaagatgggggcatgcacttgtaatgtaaatgtaaaagcaaatgtacacaagtgtgttcaaatggtgctataatttagttaattatttaagaaaggagttacctgcatgtggcaagacaacacgaatggattagtttatctcaggccggtatcaagctagggcatgatcgatcatatgtaagcttatggttaagacggcacccaaatagaatgcccgaagaatacttaatggaaaccggcacagttaaattaatttcattggaaggcattgaatggataaggaaacaaacaaaaaaagagggcgtcctcgtcagcagtagagttgctaacggggatcagcacctagaattacgccttctaggtgtcaccctcctaacaatccattttaccgggtgggctaggggaaagctagttgcttaatatttctagcctagaaaagggcaatataaggaggtgatccaatgaaagtagaaagctggcaaggcattaatggcaagctagttcatgatgatcaaaaggcgattgtggttgatgacgaccacgcactaactgatccaaaacagttacaagcgatattagatcaagacggtcagccaatcgatgaagttcggcaagcaatgattaagaagaccgttaaacgccagttgaagactgagccgttaaagcttagtggttggtttaatcgccaccaagacagtcaaaatgctaaaaaggccgaaaaattggtaagtgataaaccgactcatcaatataagcagatcaaaaatgaaatgaccttttttggtgagagtttcctggaaggtttcttaggtttctatggcttagaagctgtttagtatctttgattttgacccaataatttgataaactactgtcaaaaaagttggtgatcatatgcaacattttagtcatcattaccaaagcgatatttctcggcaacaattcgatttgatccgtcaggatctggaagcttcaagaaaacgaactcacccaaaacacattgatccttatgatatcttctgtgccatgctctatgtccttaaaaatggctgtacttggcgtgatttgccggctgattatccaaagtggtccaccgtttactactattggatgagttggtcaaaagcccccacccctgataaaccagctttattaactcaggttttaaaaaaattgtcgctgatcgacgattaaggcaagggcggtcagcccgaacttcgttcgtcattttagatgcccaaagcattaagaacaccgctaccgctgaaaataagggttacgatggtggcaagaaaatttccggcattaagcgccatttagccgtcgacatcaatggattcccgcaagctatccatattacccgggctaacatcactgatcgtgacggggcgattgcactcgtcacccttaatttagagcagtttaaattggttcgaaccatgatggttgatagtggttataccggccaaaattttgccaatgagattagcagtttaacctcagccaaggtaatcgtcgttaaaagaaatgagttacaccaattttcggttatcccccaacggtggctcattgaacgttcatttagttggttgggaaattatcatcgtttatggcgtaactgtgagcgtaagctcaacactagtctcatgatggtttcgttagcttttatcaggttacttctcaaaagatactaaacagtttctaagattttttgatggtatctttagattgggtcatgaagtccgtcctaacttattggttttgtcacttataagtttaaggcttcatggcctttttggtctagttatttaggtgttgcacttacattgtaaatccggcgtcacaaaaaaattgactgacgagtaaataattcgttgactcgtcagtcaatcgcgactatactgtaggcgaaaaggttgatcagataccgacatattaaaacgtgtttcaagtttgaccttaaggaggatgacaaaaatgacaacagctattatcgaacttgaccatcttcaaaaaaactttggcaagtttgccgcattaaaagatgtcagtttcacgttggcacccggtcaggttctgggttttctaggacctaatggggccggcaaatccacgaccattcgagttattttaggcttattaaaaaagagtggcggctcagtgaccgtcttcggcaaagatgcctggcgggatgatgcggcgattcatccacgcatcgcctatattcctggggacgtttatttatggccaaatctttctggcggcgaaattatcgacctattgctacgtttaaatggccgccagcataatcaaaagaccgatgaactaatcaaggcctttgaatttgatccgaagaaaaaagctcgtacctattcaaaaggcaatcgtcaaaaagtagcgttaattgctgcgttgtcgcaagatgccgatttgtatatttttgatgaacccacttctgggcttgatccattaaatgaacagactttccagcaagaagttttaaaactgaaaagagccggtaaaagtgtgctgctatcaagccacattttgtccgaagtcgagcgaatgtgtgattcaattgttatcatccgtgatggtagtgtgattgagagcggcaatcttgatcaattacggcatctatcgcggatcaaaattgaagtcaccaccgctaccccaatgactgctttggcaaagcaagctggcgttcacgacctcacttatcgcgattccgagcacaccaaggcggttttcaccgctgatcgagacgcgcttggcaccatcatgaccacactggccgccaacaccgtggtcgacatgcaatcaacgccgccaacgctggaagatttattcctgcgttattatggaaagcaaggtgagactcatgcggcacagtaatcggaacgcaggttatctgcttcgggcaaacctcaaacaaaatctaaaattttcactcatctggcttgtcattttgatcatgatgattgccagtggtgctggcaaattggaagcagcctttgcaggcggggcctcgggctctaaagagattgtcaaaatgctgcaagcgccgggcatggcggcaatgtttggcgcgatgccaaaggtggacacgtataacacagcgattgtgtttgctggtgtgatggtcgtcttcatgattattttgcaggccttatgggttatgccgctgatgattcgcaacacccgcggtcaagaagaaagtggcttgctcgaaatggttcgcgctcgcaatgttgggcgaacggctgccatcaccgccgcttcgcttgagcttctcatcgacagtgccataatgggtatcctctattttgtctcgttggccgctgtcaacatgggtggtactgacttgtacggtgacttcctgttttcactggggatggtgatcgccaacttgctattcggagccattgcgttgctattcgcgcaactaaccaataacacacgtacagccaatatgttgagctacatggtgctgactgccgcttatttggttcggctggtcaccgatatccagcatcaaaatctgacgtggttatcaccaattggttggttcgaaaaagcaaacttctatactgataacaacgtctgggctttaggtttggccttactggtcagcattctgcttgcggccagcgccaccatgattgcccgcaaccgcgatctgggcgccgggattattgctgaacgcaccggccgagccaaagctgccggctggcttcgctcgatccctgccttactgtggcgaactgagcgcggattatttgctgggtggttaatcggcgccgtggtgtttggcggcgtcatgggtagtgtgctcggcggcgttggcgacattcttaaaacgaatccgctttatcgtaaaatactagatgttggccaaatcaacgctgccaatcagaccatggtcctgtcattcttaggcatgtatctcggcattttcgtcgcattagccgtgactgctggcgtccaagtggcattccgactcaaacgcgatgacaaccttggttacttgagcgtcattcatgccgaaaagccaacgcgaaccacgatcagtgtcagctactattgctttggtctgctggcaggcgtgttcgtcctttctgctgggctgctggccttgttcttcactgggaacactgttctcagtcacccgttgccgctcaagtacctcggtcgcctattcgtggctagcgttccggctgtgatatcgtttatcgcccttggcatcgcactagtcggtctgtggccacgcttaagcagtctattctggctgtatatgggagccggtctgatcgttcaaattttccggggattgtttgatttgccaaaacacgcaggcaacttcacaccttttggctggattgccaatgtaccggttgaaaacgttgatcaaacatggctaatcgtgatggttgttagcgctatagtattatttattcttggcattgctggttatcgccgtcaggatttgagcctatgaaaaatgttgtgacagatcctgaaaaggtcacccgaatcctcaaaacagcgacggaaattttcggccagcaaggcttcatcaagagcaaaaccgatcagattgccaaccaagcacaagtatctaagggcttgctcttccattattttggcaataaacaagcgctgtatcttgacgctttcaaatatgcctatcatcgaatttatgatcacatggaccccaaaaagtggcagaatgcccctggcttggctgccatgatgaccactgcagttaagtatgagttgaaactacaattcaaattcccagctgaataccgcttgatgatgcaagcctatgctgatttaccgcattttcccgaaccgttgcgacaacaagtgcagcaagaaacaactgccatatccgctgaaaccgatcgcatttttcgcgagaaaattgaacagctgcctcgtcgtgagggcctgtcagtcgatgacgttttcggtgtcgtttctgccttaatcgcccaacaaacggcggtcaccaccagactcattgccagtggccattatcgcaagtttgaagatctgcagtccgtggttgagacgatggcacgccagttattgattgtcgaacacggctttttaccagatgaaagttgacgtcagctgatagatcaaaaaaggtcattagggtataccctattggccgtttttatttttgtgctatactaggaaatacagatgttcattagaactgtccaaaaaggagcggcaaaatggcaactattggttatgcgcgcgttagttccaaagaacagcatttagatcgtcaattaaatgctttaaagaatgttgataagcttttcactgataaattaagtggtgcaactaccaatcgacccgagttgcaaaagatgttggcctatatccgtgaaggggatattgttttggtcactgaattagatcgattaggcagaaataatcaagacctaaccaaaatcatgaatagcattcaggataagggagctacattagatgtgttaaatttaccatcgatgaccggcatctctgatccgaacttgcgccaactgatgactaacctcattattgaattgtataagtaccaagccgaaagcgaacgtaaacgaattattgaacgtcaacaacaaggcattgccctcgctaaacagcagggcaaataccatggccgtaaagcacaatataaccaagatgatccccgcttacaacatgcctttaaactatatcaagccggtatgagtgatgtggacgtggcccgcaataccggtataaagcggacaacttttattcgttatcgaaagaaatttaagattgtgagaggtggagtacatgaagccacataaaattatcctcacttgttttgcgcttcttgttttgggagtgtgtagcctagtaataaacacctcggctaacgcagcaatctgccataacggcggccgggcggactaccgaggattgattaaatacactaaggcggccaaacgggctaagtcccacgttgagtgtgatacgattttgatagatcaagacagtgccagcgatactttcccggttaacgacatcgaaacgagcgacggtacgattgaacacgaggctcacgtttcgaaaatctctgaagcccaactgtactacttgaaaagtcggggattagacgaagcgaccgcctcccaattgattattatgggatttttggagcccttcactaagcaattgcccatggaatacgccgtggaattagaccggttgattaagtttcagatggagggcagcatcggctaaagctgtgaaatttgcgaacgttatgcaaaattttgcccaataaaaagaacggcgaattaacgccgttcttaaacgattgataataaaattaaattagaaaacatttttaaatcattgcaacaatccttaaaaattttgcaatctaatagtctcgacctactggattatttaaaagctcgtagtttagagaaccccttgtttgaggtcgggtccgtcgaagcctgtacaaaagaattcaattttgatcagctagcggctcacggaacaggtaatttatacgattatttgttggaacaagtcggttatcggtttaaagcaggtaaattacagcaacttttgcaacggctgattttggaggttgaaccaaatggctatttaaaggtggatgaagcccgttttatccaagaaaatcaaattgatcagaccacttatcaagacgttgtgacgttactacaacaacttgatccaatcggggttggtggtcgtgatgcacaagaagtgttattactacaggcctctgctatttatccggctgatgatcttagtattttggtgataactgattattttgaacaattattagctggtgatattaaacaaattcaaactcagttagccattagtcaagatgacatgcaatcgattttacacaaaataggtgcactgagtcttgaaccaggaaatatgtttgatgactcaccaactaattttcaagtgccagatgtcattattaagatgaatggctcacgatatcagctactattgactgaatttgggcgaccaacgctgatttttgaacatgcaagttacgcgcagttccaaaaagaagtcgatgtcgctaccaaacaatacattcagcaaaaatatgccaagtatcagatgttaaacacgagtttgcataagcgcgggcaaacattattaatggttgctgaagtcctaatcaaggcacagtgggattatattactggaaaacaagcatatcctaatcaattgattctacgggatatcgcaaatcaattgcagctcagtgaatcaacaattagccgaacgattaaagaaaaatcaattcggacgcctaatggtatctatcttctgcggaatttgttgaccaaacggagtacaactttagaggaaggtcccaccttgacacagacgcacattgcaattcaaacagttgttaaggaagaagaagcccatcatccattgtctgatcaaaaaatcgcggaccagttaaaagttaagtatgacattaaagttgctagaagaaccgtcgctaaatatcgtcaagaattaggtattgctaataaggcagaccgtaaataagcaaaaaagcaatggatgcagttaatattactgtatccattgctttttaggttcttataaaattgccatcagtttaaaccagtccaatacaagtgggacccactgagctgctacagtattagcatattctggtttgcctggtgtttgagtcacatgattagcaagcgaaaggccatgaacaccagctccaaagagatggtattcaacagggattttatgttgctgtaatgcaagtgtatatagaagtgaattcgttgctggaacaagggcgtctgtggctgtttgccaaataaaagctggtttagctgctgctgtgatatttttttgtgcgtgccataaagtttggtccactgtaatctgttgcttagttgcatcatcaattggaaaaccagcgtcaaaatcaatcacaggataatttaagacaatcgctgcatgatgaccacggtaatcgtctaacccgtaatcagctcggtggattggatcggtcgcaatgccattataggtagcgaccacatgtccaccagctgaaaaaccagtcaaaacaattcgatccaaatcaatatcatattctccagcttgatcagtcacccactcaattgtcttagcaagctgatgtaaagcgagcggataaacggtttcagtcgaacttattaattggtaggggagaacaatcacgtgaaacccttctgctaaaaatcgcaacgcgaccggtgttgtttcacgacctgaatgatacgtaaaaccaccgcctggacaaataatcatgacgggatgtttaactggatgctcgaaatctggaatgggtgttaaccaatatgcatcaactataaatgcttgttctttaacggataacgtttgacgttcgatcgacattattaaggacctctttctattatattaaccgttttcaatctatgttaatcttaccggataatgacaaaaaataacagtattaagcatgactttttgatactaaccatttaaaaatctcattaagtaaagtatgatagttttagaggaaaatgtaatgatatcaggttatacagctctttacggcttggttgcgcatccagcgcaccatagcttgtcacccatgattcataatctgggttttaaacaacatcaaatcgacgcgcggtatctggttttcgatagccaagcacggccgcaagatgtcgcaaaagcgattcggacgcttggtgtggcaggcgttaatctttcaatgccctataaacagtcgcttgtgccattaatggacgagttaatgccaactgcgcaactcgttggcgccatcaatacggttgctttacgatcgggtaaattggtaggcacgaatactgatggcgatggtttttggcgcgctttgcagaaaagatatcccaatctagctagtcagcagattgttattctgggtggtgggggcgctgctctcgcggttatcgaagccgccgctcgctatggtgtggcgacgattcaggtcttcaaacgtcaaaatacgacttatgcggtggttgaacaacgactggcaaaaattgctaatcaccattcgatgtccatcgtgctacataattatgccgatgaacaggcactccaacaagcactcagtaatgctgattgcgtgattaacgccacgaatcttggcatggtcaatacccctggattaccgctggcagcacctttaattggtcaaataccgatgacttgtttagttgccgacttaatatatgcgccacgtcagactgcttttttacagttagcggctcgaagtggtcatccaacccaaaacgggcttggcatgttagttgaacaggccgcgttgagttttcaattctggacgggccaggtcctacaaaccgatcccatctatcatgctttaacgaaggagttttaataatttatgattattcaatttaaaccaaatactgattcagcgctgattgatgatttttgcgcacgacaacgcacgacaaatccgaatgtctatcagattaagcaccatgtagcggtgatcggtgcaaaagcaattgattttacccaagcagaggaagaagtcattgcggcaaccaccacggatgaaccgagttacgtgcttggcagtcggctattccaacccgaaaacacggtcatcgaattagcacacagtacgattggcggtgcagacttcacggtgatggcgggtccttgttcggtcgaatctgctgaccacattatggcgatggccaaagttgctaaagaaggcggtgcgactattttgcggggtggcgcgtataaaccgcggacatcaccgtattcctttcaagggatgggcgaagctggtttgaaagcattgcgcaaggctgctgatgcttatcaaatggacgttgtgaccgaagtgatggatgaaacgcatgttgatttagtggcgcaatataccgatatttttcaaatcggggcgcgcaatatgcaaaacttttcattattgaaagctgttggaaaaaccaacgttcccgttgctttaaaacgtggcttagcagcaactgttgatgatttattaaatgctgccgagtacattgctgccaacggtaatcaacaaattatgctgttagagcgcgggattcggacgtttgacaatcactatacgcgcaacacatttgatttaaatgctgtcccagttttacaaaaattaacgcactatccagtcttaattgatccgagtcatgcgactggtgaatgggatcttgtgacgccaatggctcgggctggagtcgcaactggggcaagtgggttacaagttgagattcatgatcatccagaaaaagccttttctgatggcgcacaagccttaaagccagctacttatcttgaaatgtgtcatcaagtgtgggccgttgatgcagtcgtcaaacagtggcggcactaatggtgataattgatgtccacctcacacaaaaaaattatcagattcggatccaatctggtttgtatcacatctgtgctgaacaaatcgcgcaagtttggacacctcgtcaaatcgcattaatcacagacacgaatgttgccccgttgtatttagaaacggtcgaatctcaattaatccaagttggctatcaagtcacaccgattattattccggctggtgaaacgtcgaaatcacttgaccaagcaatggcactttattcccaactggcagcggcgaattttacccgtcatgacggggtgattgctttaggtggtggggttgtcggtgatttggcggggtttatcgcgtccacctatatgcgggggattgcatttattcagatgccaacctcgcttttggcacaagttgacagtagtgtcggtggaaagactgcacttgatttaccagctggcaagaacttagttggttctttttaccagccggatttagtattgattgatcccgactttttaacgtcgctggatcaacgccaattactggccggttatgcggaaatcgttaaagtggctgcactcaacggtgggacattttggcaacaggtaacagggattcaaagtgcgcatatgattctagcgcaggctgaaacactaattcagcaaagtgtgcactacaaggcacagattgtcatggccgatgaaaaagaaagtaatcaacgccaattattaaattacggtcatacgattggccacgcggttgaaaccctggccaatggcagcctgatgcacggtgaagcggtcagcatcgggttagttgccatgcagcacttagtcgaacaaagtggactgactgaagcgcatttaacaccagtgattacaactgttttaaatgcggtcggcttgccgacagatagcccgttacttatgagtgatcgactcttcacgcaacttttacatgataagaagaatcaaggagatgccattaatcttgtttacctcgatgcaattggtgttccaaaaattcaatccataccactaacgactttagcggctaatctattttcaaaaaaaaactggtaaccaacccacagataccttacaatgaaactaacttgtaaagagtgtttaactgaccgtatgtgcggagcagtcttggaaccaacaatatatttgaaatagaaccataggggttgattgactagatgcaactgattttaatcggttttatggggtctggtaaaacgaccattgcacgcaaagttgcacatcattaccattgtgactggattgatttggatcgctacatcatgcaagaacagcaaatgacgattaacgaaatctttgccgaaaaagggcaggctgcatttcgacaaatggaatttgaggccttacagacattgatccaacacgatgggattatcgcaaccggcggcggggtcgtggatgatgctcagacgcgccatttacttgaacagagtcatatccccatttttttcctaaatgggagttatgaagcacattggcgccgcgtttcgcgcaatgatcggcggccacttgtgaatcaattgggccacgatggtttacgcgaactgtatcacaaacgacgaccaaagtattatcggcttgcggactacaccatttttttccaacataagacaccgaacatgatgttggcagaaatcgatacgcagctacccaggattcaaaaaaagttggctaataaacattagtcagcttttttcaatggtcgtagaatcatattattcgctttttaacgccatagacttgtatgatgaggttataacaaggagggtgaacaatgacatttaaattaccagcactaccttatgaatatgtggccttagagccgtatatcgattctgaaacaatgcatctgcatcatgacaaacatcataagacttatgtaacaaaactcaacgcggcgctagccaagcaccccgatttagcaggtaaatcattacatgatttgttaacacacatcgatgatttacctgagaatcttcaagcacctgtccgcaataatgctgggggccatgccaatcatagtttcttctggcgaattctaacaccgaatgcgccagaagcaccaacgggggaattactcgaacggattgaagcccgctttgggaagtttaagacgttccaagaagcattcaccgaagctgcccttggtgtatttggctctggctgggcatggcttgttatcgatcaaaatggtgaactacaaatcatgacaacgcctaatcaagattcaccacttatgagtcgtaatcgaccactacttggacttgacgtttgggaacatgcgtactacctgaaataccagaataaccggattgattacatcgaaaacttttggaagatgatcaattggccattggtagcggaattactttaataagggtgttcattataatacatttataactgaataaaataagacccatcacttaataagtggtgggtcttattttattttacacaattgtaaacactgtcatcacaattatagagcgatttattcttaaatgtaatagttgtagttatcattattgacatttttaatattaatagaataattatagaaatcattagggttttttaatagacaattttcagcagtccatgctaatctgaatatgttataaaaataataatacttttaggggatgagactatcaagaatgtaatcggaattttagcgttaggaatcctaacaactagcaccatcagttctatacaaacagttaaggctgaaccaagtgacaatcaccaaaatttagcgagtagcgtgctagcagatagcctcaaatccaaggtgaggcaccagcaaaatctaaaagcaccacaagaaatgaaaacctatattggtcgtggtgatgtttttaaagaaaaagaccggcaacgcagaacattacgctactcaagtttagagcctagcggtttatacgcccaaaaaggggatgttttgacagttgctcaggggatgcaagattcattatctatcacaattggttcgcccgaacgagaaaatcaaaaacaatatccattaacaaagggcattacaacgattaccgttgaaaacgagggcccgatttatgtgactaatcctaatgattctggtgaagcaacaatcacaatatcaggggcaacaggatcaatgccatatttcgatttaaatcaaactagcgtcgcagactttgagaaacaaatggcggaaatgacgaatgctaaagatgtgcagttggtcagtaacaaagcattaattacagttagttacgcaatggctaaaaaatatctcggtgaccctaaagaactgatgacctattatgatcggtttttaacggcacaagatcgggtttcaggcattactactgaaggaaatccagtaaactttgttgatcgccatctccaacatttcttagagtcacctaagttgtatatgtatacagaaaatgaatttatgggcttccataatgatcgcgctttgcaacgactactgaagacaaatgaaggttggagcatctggcatgaaagtggtcatcagagacaacaaacaccttggaaatggggtgctgttgtagaatcaagtgttaacatttatgcattagcggctcaaaaagaattgactggtaaaatgacatcgttagatcaatactacccagaaatgcatacttatctaaaatctgataataagcaattcaacgcacaaaataataatttaaagatggttatgtttggtcaattaggaaatacatttggtgataacttttaccccgttttacatcagtactatcgtgaaaacaagcttgcatttggaccagacaatgaacggatgcaaaactttgttctaaatgtttctagaattacgggttataatatgcagccttatttcgaacaatggggatttgatatttccgcagcagttaaagctgaaattagtcaattagcacctttaccagaagctatttggttaaatgataaagaaactaataaacagttacccatgcgcttaatcgacaccgtatcgctgaatgaccacggtattcaagttaacctgactgactaccaaaccgatgtatttaaggatgagcaattaatccttaaaaagaatggacaagtgatttccaaactcgtcaataaagagccaattgaaagtatgttaacaaataatgtttgggaaacaatcgagatgcttaaaccgactgatgtgattacaattgaacagcaaaataaaaatggtacttttaaacgatatgaacactcaattgatagtattgcacttgaagaagagttattaaactatttgaatgcatcagaaccgattggtacaattctaacccaagctaaactagatgctctccgaaatcgaattgatgctcttccttctacttttgactataaagaaaaactcttagaactatttacaaaattagaagacaaatacctagctacattagtcaaagatattcaactggattcacaatcagcattagtggtatcgtttactgatgagaagtttaaagactatgcgaaaattaaggtacttgttgacgaccaaccagttgcagaggtcaaaaatggtatcagtagtggtggtcagctcgacgataatgtcttaacaattcctaaccaagcggatgcacatgttgttaccgtagtggctgaattaccgcacaagtcttacattctcaaaatgattagtcaggatattcttcttctgaaacgtcaagttgaagcgttatttgaaacaaacgatcagttgaaatctgaggtcacacaagacctattagatcaattacgaacacaaattaacgcagttaagggctcggaaaagacgatattgactcaaagaattaaccatgcacagcaactgttcttgaacactttagttgctgacatgagtgttaaaaataataaaatcgtcgttacctttgctaacgaattatttaagcattataagatagtcgtattaggaaacaacagctatctggcagaagtcaccaatggccaaaactactatggttccctaaatggaaatgtatttactccttctaaatcagttgtccatggacatccttatcgggtagaagttagatacgcaagtggaacttacaagattagagagatgattgctgagtaaataaaatggtcccacatcaaaatacgatgtgggaccatttttatctataaattactatccgttgtaaagttgagtggtgataggttcgcgctatccgtaatcagttttgcggtgaggcgttccatttcgtgttgtgcgagttgtgcagccttagcagaacctttggtcatcaacagggttcgttggtgtgcatcagtttcagcagcaaccgcttgatcagttgccacgatgttttgaaccatcaaactattgatgtgtttttgcgtttgttccaagtccttggcgaacttggcgtagtgtgcatccaccaaaataccagctaatttataggtccagtagatcgaatcttgactgtaatcctttgtccctttttggtaattgactgggacgtcatcggcaccggcatagaatgggacgtaaacactttgcgccgtgacacccattgataaccaatgaataccgctaacatcaaccggtaagttagggcgcatttggagaatgtgtgattcttgcgtctttgctaaactaattgggcggaaagcatgtttttcttgtggtgtgccgtgaccgattggatcgtagaccgtgccttcataatgcgagcctagaattcgcgcgacatcttcgacttgaatgggcgcatcggcttgtcgtaagaaggggaggttaaagtcttgaggttgttgggtgacagatggcgttaacaatttttgaccgtaccaaacgcgcggtgtgttgtaaacaaggtcactttggtctttggtcccaaagatatcgcggaagttaaatggcgtatcagcttgccataggtgattatcacgcgcaaaatcttgaatcccctctgaagtcatgaaccaatccggttgatcgaattgcacttcttgaatcgcaagttgattggcaaccacggcatagctatcatccggaatccgttgggcaacccagtgatgtccactgccgatttcaagataccagacctcatcgacatcggaaaagagaatcccgttactttcagtggtgccgtattcactaacgatggcgcctagccgcgcaacaccttcacgggccgttttcacgtaaggtaagacgactgtaatcatggcttcttcagcaatcccgttgtcgatgtaggggtcaaagccgagagcgcgactgttgctataagcactttcggtgccgctcatcgcaacgccgtattcgttaatgccgtcttcttcgaatagtccatattcatcggtccattcgggtgtcgccgtgtattttgcggcttcaagtggtaaatcgattgaaaaacccgtgtcttttgagacaaagtgcggggcagtcgttaacttttgatggggatggatggttaaatgtttaggccaagctgcctggctatcttcgttacgtgcgattaaagttgagccgtctgcagtggctttcttaccaactaaaacactggtacaggccgtcaattgacggtaaaggggttcactcattgtaatgcctccatagataaatcaatattagctattattatacattcttttgcttaaaaacacagtaattaccgttgctcaattgcgttaaaacaggcataatataagtattcaattaaaggaggcaccacacatgccattagtacacatcgatttaatcgctggccggagccaagcacaattaaaacaactctgtgcagacgtcacagaagcaatcactaaaaacacaggcgcacctgcagaacacgtgcacgttgtcctaaacgaaatgcaaccagaccgctactcagtaggcggcgtgctaaagagcgacgaaaaatagagtgcgacgtcagatggtcatacgctgaggattagtctaataccgtgaatgagcggcgtagccgatcgtttgcggtatgtaactaaccggaagtgtatatctgacggagcacgtttcagaatagagtgtgcaataagccgggtatcttctgaggattagcctaatcaggcagattaccgacaaaatcggtgatttgacggatgtagctaagcacagaaagttagcttgaaaagcacgtttcatccatcaaaaaaagcgattcgaccagaaattgtcgaatcgctttttcattaatccatcttaaaatattgccgtaaataattgaccacaccatcttgcgcattcgtcagtggtgtgatgtcgtctgcaatcgccttgatcggtgcaattgcgttttgcatcgcaaccccggtaccggcataggctaacatatccaaatcattactttcatcaccaaaggcaatgatatctgattgatcaatgtcgtagtgtgccgctagttttgcgaggccggttgctttgtgaatcccatgatgcacaatttctaagacgctagcaggaccaccccaagtgttgacggaaacgtcagggaattggcgcagaatttcagcacgtaacgcatcttgatcagcgcgttccacaaaaaccgtgacggccgctgggtcttgccgaagcgattcgcgggttaaaatttcatcggacttcaacgttgtggggaagaaagaaaacgtgttggcataagcttgatcagctaaaaacatcgttttaccttcggcggcaatcatttgaatcttaaagcgttcttttagttggaagagactaaagacaatgtctttattaatcgtatattgatattcaccggcccaggcttgtcccggaatgtgcattaaagccccattaaagttaaccattggcgacgttaaacctaattgttggtagaaaggttcactcaaacgatttgggcgccctgtgacaatactgacaatgtggccagcgttttgtaattcagttaaagtttgttgcgttttaagtgtaatttgggcatctgaattgagggtagtcccatctaaatccagtgcaatcaatttttgatgcatagcggcgcctccttttaaaaacgtgtttggttaaaacacgatatgtctttttattctagggggtatgcggattgttgtcaatgatcgtcagttgtaactggtcggttgaaccagtataatagagctattagagtgaccaggaggcaggacacatggcagaccaaccacaagatgatgcagcaattgaagacttaaaggaacggattctagccgcgctcgagaccgtgattgatccagaactcgggattgacattgtgaatctcggcttggtttacggtttaaacctggatgaaaatggcttatgtacgattgatatgacccttacaacgatgggctgtcccttaaccgatgttttaacggattcgattcatcaagcaatgggcaaaattccagaagtcaatgaagttaaagtcaatctcgtctggtacccagcgtgggataccagcaagatgtcccgttatgcacgcattgcactcgggattcgttaaaacgttcgatttggccttccgattgggaaggtttttctaatcgtttaagagaaacttatattagaaacggaatccattatgatacagttaagttatccagagaaattgcgccagagtcaacgtttttttgcaaccgtcccagccattcaagtacaaattcatgctgttttaactagtttattgcagattgaacaggacggcttgcccatacataatttacccgttttgggaattgatgaatctctgtatttagaaatattactccaggctgaacagggggcttttagcgccgctagtgtggctgaggttcaacgtcagttacagttaatcgaccacttactgcgcaattaccgtgaatatttgcaaaatcgctttggcatgtgggcctatatcactacagatttgacggcggcgattgtccgcgagtttcccaattggcgttttctagaagtcatggctggtaacggctatttaagtgctggtttacggcaggcaggcgctgatgtgatttgtaccgatagtttagcctggactgccgagaatgaaacagggcgccaattagtcacgtcagtggcagctcttgacgccaaacaagcggtcccaaaatatggtccgcaagtcgatgcagtcttaatgtcctggtcacccaacggcgtcccagttgattatgaattgctgcaacaacttcgtgcaatgccaaatgcccccgttttgttgtgcttaggcgaacgttttggcgccacgaatagtcacgccttttggacggcggcccattatcacaacgacgcccgtttatcacggattaaccgttacttacgcccattcgatttaatgcgtgatcggttttactggattcaatagtctgctttaaaggagggcccactgtgcgcctgaaaaaaataatattagattgtttactagttggtttaacagttctaggcatgttaacgattagccaacgtgcaaaaactaactatagccaacgcttaaatcacaatagtttatcagaaaatgctgtgatttttaattctaagagtcaacagtcgattcaaaaaaccattcaaaaaattgatgccgcgaaattaagccattttcaaattcaattcaacgttgattcccggttctcatatgtctatgcgaaagggaagttatcgagtgtcccattaaaagacggccggttcttctccagttacgatttcaaatcacagattccagtcgtcgttgctggtcaatcacgacttgctgaactctacaaaccagctagtcaagcgtattatcaagatcatggtcgctacttatccgtgattggcgttgtcggtacgaatcagacaactacgcttgatcagcacatttttgtatccacgtcaccagaatttgtattaaatgatcgcccactgaataaagtcaccgtattggttgatggtccgcagatgggagcgcatctgaaaacttaccaaaagattttcaaaacgactaagcacagttatttaacaccgaagacgacgccgttagtcggcgtcaactggctccgtcaaaatgcgggtgtaatcgcggtaattgccgtcctcatgatcatcgcggtcggtttcacttatttatttagccaagttatcaatggttatcacgcacaaaaagggctcagcactggtttatatcgtaaattccgcgtggcacaaacccaaatttttgcgctgcacctagttgttagctcaatcattggcttctcaattggtagttggttcttttacctaacgggtcgaacagcgatttttattggattgatgatcattgatctcatcttaatcggtatcttttattatttaattccaaaaggacgaaaaacaacatattaaaaaaacggtttagtcattagattgactaaaccgtttttttttaagggttaaactttacgccgtggttcaataaaaacagcgcatgcgccactgataaatacaagactgaatagagttgtaaaccaatctcgaactgctgttaagcggtctggcacaaaagtcataaataaaatcatcgataataaacacgctgcaaacatcgttttaaaaacgcgatacataataagctgtgagcgttcatccgaacgtccaattctagttataccatagtagaaaaacagaattgaaatgatgattaatccgattgccacaccagcgattacatgggcattttgatttaaaaagtgtagtaggggccatattgttacgcctcccgataagtgaatagaacgtcaattggtacatcaaaaaatcgtgcgagcttaaaggctaaaatcaaactaggtgagtagttgcctttttccattgcatagatggtttgcttggaaacaccaaccgcttgacctaatttttcttgagaaagatgttggagtactcggtattcatagactttattttcgacataattcgtttctttcaatatgcaccacttcattatcaaagtttacttatacttttaacaactatatttttacattatccaagttaatttgtcaagtgctttagcgaaattccaatgaatattttaatagacggttacgctggttcttcccgaaaaagaccaattttagccaagtaacgactgatgagatcctagcagcacttgaactaattaatcaacgaccattaaaaatacatcatcaacagactgccattgaaagattccgggcttgttcggattaaacttgtaatttgccggatcaaacaaatattttttatcgacgagatattggtaagaactccatttagttcaaaaaggtagaagtaagacttcgtttgaaatattacttctacctttttatttggatcgacatcttagaactttgagtttttgaaaaatttatagacatagatatttagagtattttttattagtcattgaaactattgaaaatagcgttgcatagaacaggaaagaaaggtatgatttaagaaattggtaatcttattggaccagttaataaaaataagtggttttctaattttaaaatgttgatctaacagtcttttcttagtgtactccccatgtatatggggatgattcctgctgtccctgaaacttttgccaatttagatggtactccccatgtatatggggatgattccctaactgtccatcggaaattacttgattcatagtactccccatgtatatggggatgattctattcaaaaacgtaccattgatttagtagatcggtactccccatgtatatggggatgattccaatatttgtgtctgggatttcgttgccgttcagtactccccatgtatatggggatgattccgttgcaatgcttaaaacatcgtaagtgtgtcagtactccccatgtatatggggatgattcttaactgatacaatcgcagatatcaactatgttgtactccccatgtatatggggatgattcctgtaaacaagcgcggttcttataaaactgatagtactccccatgtatatggggatgattccacgttttatggttatcgggtgtaataacccacgtactccccatgtatatggggatgattcctgacgagaacattgctaatggattgtaacctggtactccccatgtatatggggatgattctaataaagccgactaccatatcaatcagtggcagtactccccatgtatatggggatgattctcaaattagggttcttaaccaagattttagacagtactccccatgtatatggggatgattcttaaacagcaagtttgaagtgataattaacactgtactccccatgtatatggggatgattctggcgagtccatcgaatttgaaagcgcgaagaagtactccccatgtatatggggatgattctgtcatgcttaattcctccaatttaattaattcgtactccccatgtatatggggatgattcttgttcatacttcatttctgatttaactaagcggtactccccatgtatatggggatgattcttgatattataactacaatctaataataagatagtactccccatgtatatggggatgattccgttagttatcatggtgggtggtacattataatgtactccccatgtatatggggatgattccggcaaggaattcgcaacagcaatcaaaacaaggtactccccatgtatatggggatgattctcgtaaaaacgttcccgtctattgctgaaatgagtactccccatgtatatggggatgattctatcgaacaaccttcgtcaaggttaccaacacagtactccccatgtatatggggatgattctatttttaccgtcctttttagttataattttgggtactccccatgtatatggggatgattccagcgttacattgtatgtaccaaaagagaataagtactccccatgtatatggggatgattccaaatataaagcgttataagggattgtgagttggtactccccatgtatatggggatgattctagtctaatgataatatatatctaatcaataaggtactccccatgtatatggggatgattccaaaacggcaacaacggctcagaccctagcgcagtactccccatgtatatggggatgattccaatattacaattcgataatattcatttatatagtactccccatgtatatggggatgattctgccattccagacgcttgatgtggcagacttaagtactccccatgtatatggggatgattctgggctcgtgtggctcgatgataaccagataacgtactccccatgtatatggggatgattctaaaaggtgatccagttccagcagaacggccgagtactccccatgtatatggggatgattctcagaccagcagactccatcagtcaatcagaccgtactccccatgtatatggggatgattctggtactttgacacgtattacaaaactgacaatgtactccccatgtatatggggatgattccttaattagtttagtgcgaccgcgactagccttgtactccccatgtatatggggatgattccttatcagacacattaatgccaatacctaactggtactccccatgtatatggggatgattctaagcgtggcgcaattccacgcccaccatttcagtactccccatgtatatggggatgattcttgtccactagtgataacagcatggttgtccgtgtactccccatgtatatggggatgattctattcatcgcaaaaattcaataatgcttttaaggtgttccccatatacatgggatggttttaattagggccaagtgctcttttttatcataattttttcagaagtgaaattgtaccgtaaatagatttagtcatgagctaatttgtaatgaggttagatattagaaagtaaattttcatttcttacaagtctaactatattaatagtggcataataaagataacgattacattgccgtttgcgtagatacatttgaaagataatctctctaaaaaggggaaatattaaatgtcagtaaaattaacgagtagagaaactagtttatgggcaaaaaaacatgtagatgatggggaaatgttgtggcttccattagttgcccacttagtagattgcagtcatgtgatgaattggcttttttatcattggttaaatgccggtcaaagagaattgttaactcagtcggtttctgaagaagacatgcaaaagctaattaaatttttgggattctttcatgatattgggaaagccacaccagcttttcaaacaaaaaaatcttacgataataatgcctcgcttgatgaagagttgattgaacgcttgaatcgaaatggtttttctgaattacgagtatctggattatcatctccacaaaaatcacctcatgcattagctggagaagcaatcttagaaagtgatgcatttaatattcctgcttccgtaggggctatcattggaggtcatcatggtaaaccggctgaaaaacataatctcagaattcaattggaaaattatactgccaactacgatcaagttgatgggcatgttaaagatcctattgaggaagaacgtcgacaggaagaaaaacaagcttggcaagatactcgacaacggttatttgattatggaatgaatttagctggatatactgaggctggtgaaattccagaggttggacaaccacaggcagttatcttagaaggacttctgattatggcagattggctatcttcaagtgagtggttgaatgaagatcgatctaaacctctgtttccactaattgggcttgatcaaggttatcaagacatagatatgacaagtcgatttgagaatgccattttaacgtggaagcaatcagacaaatgggttccacaaagggtgatactgaatgataatactaatccatattttaatcattggggatatactccacgcccggttcaattagctatgactcaagcaattcaggctacaactgatcccggacttgtaattgttgaagcgggtatgggccttggaaaaacagaaatatctttaattgcagcggaacaacttgcgtataaaactggcagaaatggattttttatggggttgccaacgcaagcaacaaccaatgctatgtttacgcgagtgcttgagtggacaaaatttttggctgatgatgaaggaaaaaaattacaaattgatttgatgcagagtaaacgacaatataattcagaattcactaatttgccagaggctagcaatatttatgagcagagtgaaaatggcaagcaacatcaaactggatcagtggttgttaacagttggtttacaggtaaaaaatcaattctgacagattttacagtaggaactattgataatctattacgtatgggactaaaaaagaagcatctttttttacgtcatcttggattcagtggaaaagttgtcgttattgatgaggtacatgcgtatgatacatatatgtctagttatctctttaaagctatgaactggttaggagcttatcatgtgccggtaattattctctctgcaactttgccagttgaaaaacgaaatcagctggttaaagcgtacttaaaaggaaaatatggtttaaactatcagaatcgattaattgttaaagatggatggaagacaacgcaagcttatccgttactgacaattttggacggacctgaattaaaacaactaactaaatttgatcagaagaatcaaaaatctactcatttgcatgtacaacgtttaaacgtgaatgatgaagaattggttcaagcagttacagataaaataaaacagggcggagtagctggtattattgtcaatactgttaaaagagcacaagttcttgccaaagcatttcagcagaatcaaactatgggcgatactcccttgatggtattgcactccgcattcttagcacctgaaaggtctaagcaagaggaaaaattgcaaagacttattggtaaagacggtcatcgcccacacaaaatgattgtgattggaactcaagtattggaacagtcgcttgatattgattttgatgttttatatacggatattgctcccattgatttgattttacaacgtgctggtcgtttacatcggcatgatattcaaagacctgaaactttgaatattccagaattatttgttatgggaattcaagccccatatgaatatggcgatgctaatgaagctatttatgaaaagtatcttttgatgaagactgactattttttgcaagatacggtaactctaccgaacgatatttccaagttagtacaggaagtatacgatccaaaaacggatgatttaattccagaaatcggagaatcgagaattaagttagataaagatcaagcacaagaaaaacagcgttcaaatgttttccaaattgcggcaccaaaatttagacttaaatcgactattcatggttggttagattatgatttccgtaatttaaataaagatgaacaaagtgctaatgcggcggtaagagatattcaagaaacggttgaggttatcttgatacaatgtacagcaaaaggacaatatttagtggatggacggtcattaagagacgtttcagatcgtgaaatatctgaacaagtaattcgtctaccaatggccattacgcctaatgctaccgtgattactaaagttataaatgatctagaagataaaactgcagaatactttgataaatggcaagagagcccatggttaagtggggccttggcattgccgttggatgataatttatcagcaactcttggcaactggcgattaatgtattcagaagatttaggattaaattatacaaaggaggatgagtaaatatgatgagtcagagctttaatttgacaacagatccttggattaaagtgatacagactgatacaggacgggagaagtctgtatcactgattgaattttttagtcatgcacaagactatcgtcaattggccggagaaatgcgctcacaggatttagcaattatgcgttttttgttagcaattttgactacagtatattcgcgttataatgctggcaatatgccatattcttggattaccgtggattctgacacaatgcaagcaacagatgttgatgatgatacagatgctgaggatattaatgaagatttactcgatacgtggaacaaactctatcgagcaggaaaattttctaaaattgtgacagattatttgaagtgttacgataatcgctttgatatgtttggtgatcatcccttttatcaagtgacgaccgctgactatgacgctctagttcctagtaataaacgagtcgaaaaaggaaaaggtcaggtactagttaaacaacttaatcgacgtatttcggaaagtgggaatacgccatcaatttttgctccaaaaacgggcgaacggaagaattcaattgatattgatgaacttgtgcgttggttgattacttatcaaaactttacaggtgtaactgacaaaaccaaaattgagacgaaagaaaagttttccaattctgcgggttggttgtatcggatcaatccagtttatgcccaaggacagactgtatttgaaactctaatgttgaatctgaaattaggtggtgaacaagtagacccgttagccttacaaaagccagtttgggagtatgagattcaagattacattgctgttcgtaaacaacaggtggtaccggataatctagcagagctttatacaacttggtcacgaattcttcatattgaatggcaagataataagcatccattaatttttagtgcagggattccaatttttgaagctacgggtgcttttattgagccaatgacaacgtggagagtagacaaaaaaacaggggaatatcgtcctgctgttaagagtcttcgctcgttgagtatttctatgtggagaaactttggtaattacgttgatgttcacagcaattcaggacaattggaacctggaattgttagttggttgcatgatataaaagatcaagatacatcagtcattgcagatgatcaattgttaacattagcttcaacaactctgatcagcgatggtaatgcgacctcacaggctccagcggttgaagtagccgatgatatacgattacaatcagacgtgttgtttgatcctgaaattgcggaatattggcctgtacgaattgaagatgctatagatacaactcaaatgattggaacagatttttaccattttgcttcaacaattggtcaaatacgtaatgtggatgcgcgttcatttgccagcaatttaagtgccagtttttatcagaaattgaatgctccatttaaagaatggctatcccaattgactggtgatgatgacagagaacaaaaaattgaacaatggaaagagcaattagaagatattttaaatgacacagttcgtgatgtcatgaagtctagttctcctagggacgtcagtggtattgaggatgataaaggccgtttgttgaatatttttaccgctcgaagaagactaaattataatgttcgcatacatttagggcctcaggataaggagtgatatatcgttatgggaaaaatagaaaaggttaccgatagaataattcggagtctttggagagatggaaaaccagacaaagctgttttatcaaatgttcgaggtgctgctacgctgttaagtcggcaagcacagtctgtttggccagtgatgatggctaatctggatgaaaagatgttaagtcgcgatggtcgtcccacttatgcggaaacggcagtatatgcagccattcgtttttatgcgattcatcaacaaggacaaacacaatttgtttacagttcagttcacggggatgatgagaataaaggagtgagtttatttaaagcgcttgctcagttaagaaatcaaccagatcgtcaagaagctctggatcgtcgagtgaaagcactcttggcaacaagtaatgtggctagtatgattcagtctttatctcatttggttagtattttaaaagccactaatccaacaattagaattgattatgccttattagcacaagatttatatgatgcacaatttggtgttgatgttgcgaaccaagttcatttgcgctgggggcagcagtactattggagcacgaaaaatcagaaaacaactgaaggggagaaaaactaatgaccaataatttatatttagacataaatatcattcaaactgttccatcatctaatttaaatcgagatgatacaggagcacctaagaccgctttgtatggtggtgttacgagagctcgagtttcttcacaaagttggaaacacgtcgtacgccatgcatttaaggaagatcatgtgacatttagttcacgaacaaaagagtctgttcaattattggctaatgagttacgtaagcaagatggttctcttgatgaagaagctgctttaaccaaagctaatgaagcttttaaatcagctggcatcaaggttgacaaaaataatgagacgggtgctttacttttaattagtaatggtcaaattaaaaaattggctcagtatatactcaataatgatgaactcgataaaaaagaaattaaaaaagttcttaagggagaccaatccctcgatttagctttatttggtcgaatggtagctgataatcctgaattaaatgttgatgccgcctcacaagttgctcatgcaatttcaactcatgaagtgattcctgaatatgattactttactgccttagatgatgaacaaggtgaagatactagtggagccgctatgttaggaactattgagtttaattcggccacactatatcggtatgctaacgtgaatgtcaatgaattagtacataatctgaataaagaagatgccatcgctggtatatctgcttttatcaaagattttgccctatcaatgccaactggaaaacagaatacttttgcaaacaaaacgcttccaaactatgtcatggttacgattcgacaagatacacctgtcaatttagtttcggcattcgaaaaaccagttgtatctaacgatggttatgttgaaaaatctgttgaacgaatagagaacgagtataagcagacactggattttgtagatcaaccgttattgacggtagctttgagtaaatacagtacagaagctagcaagacagcaacaaacttgtctgatctcttggaacaggttacgacggagttgacgaaggtggttgaggatgaaaatactaacgattagattgacgtcgcctttacaatcctatggtgatgaggctacgtttgaacggcggacaaccggagattatccttcaaaaagttcaattattggaatgattgcagcggctttgggttattcaagagaggatccacgaatctcgcaattgaatgatttgaattttgctgtacgaattgaccaagctggacaaatgttaactgattttcatactgttgaatggaaaaagaatgttcgcaaaattacttatcgcgattacatacaagatgcagtatttgtagttgccgtgggaagtaatgatgatcaacaaattacaaaaattcacaatgcactgcgtcatccgcattatcagttattcttggggcgtcgagctaatgttccagcaggagttcttctaatggaagaacttgacgataaaaaccctgtaacagttctggaaaatttaggttggcaagtttcaccttggtctcaaaaagtttatcgaaaacaaaatcctggtaaaatgtttcccaaagttgatatatatgcagatgcaaatttacttaacgatcatcatagtgtaatggttaaagatcgagtgggttcatttgatcaaagaaatcgatactttggttatcgagcaatgtcaacagaacgagttcaactgacatattcttgtatagcagttgatgaatcaacagaacatgatgcattaagtgcactttagaaaggggggtagtctatgtattatttatcaagagttgaagttgatgttcaaaatcgtgcaaaaatcaaagatcttactcatttaggtgcatatcataactgggttgagcagagctttccaaaggaaatagcgaccggagaacgtcatagacatttgtggcgtttggatacattagcggggaaaaagtatttattgatcatgagtgaatccatacctgattctgagtttttattgaaatatggtgttacaggaactattgtgactaaatcatacgatggattcttagacaaaattcatgatggtcagattatgcgtttccgattgacggctaatcccacacatacgattacacgtcctggaaaaaaacgtgggaaagttttccctcatgttacagttactcaacaggaaaaatggttggtagatcgatcagataagtctggatttgaattggtcaaacaagttggtgttaatgacttaaatgaaacgcagacgctcgcttttaaaattgtcgaacgtgattggccaatgttacaccgtaatccaggacgagccgttcgtctcagtcgagtaacgtttgaaggtctgttacgcgttgaaaatgcagagacttttaaacagactttagtaaagggaattggacgtgagaaagcttttggtatgggaatgatgactgttattccggaggcttaatatgtcagaaagaaaaatgggtgctaataagccagaaatttctgaacttggtcgtgtacaagatcgtatgacctttttatatttagaacatgctgatgttaataggcaggatagtgctattcaagtgacggatcaacgtggaattgtatgtattccagctgctatggtgagtgtcttattgttgggccctggggttaatgtaactcatagagctatggaattaattggagattcagctatggctgtagtctgggttggtgagcaaggagtacgtgcatatgctcatggtcgcgctttgaaccactcatcacgtttattacaagcacaagcaaaattagtttcgaatcaacgtactagagttgctgttgcgcgtaagatgtatcagatgcgctttcctgatcaagatgtttcggggttgtctatgcaagaacttcgtggcaaagaaggtgctagagttcgaagtgtttatcacaaagaatcaagaaaaacaaatgtaccctggaatcgtcgtgagtataatccagataattttgagtcgggtacaccaattaatcaagctttgactgcagcacatcaagcactttacggattgagttatagtgtaattgtggcgttaggggcatcaccaggcttgggatttgtacatacaggtcacgatttatcttttgtttacgattttgcagatttgtataaagcaaaaatctctattcctgttgcattcgaaatgactgcaaaatatagtcaagacgaagatctagcagctagaacacgattagctatgcgagatgcctttcgagacggtaaactattgtctcagatggtgactgatttgaaaaatctattaaacatagatgattgtcaagatggcgcagatttatttcaactttgggatgataaacttggtatgcagaaaatgggagttcagtatcatgatgtaacggcaggtgatgacgaatgattgttgttactttatctaaagttccgccttcacttcgtggtgacttgactaaatggtatcaggagattcaaacaggtgtgtatgtaggtaatgtcagtgcacgagtccgtgacctactctgggaacgtattttgaaaaatattgggactggtgaagcaacaatggcgtataatactgccactgaattaggctatcagtttcggacaacacgtaaggatcgacaagtggtcgattatgatggtatacccttaatgatgcatttaaagcaacaagaggtgccagttaaacatggattcagtagtgcggccaaattccataaagggatgacaatgtcacatcgacgtatgactaaatatcgaaaagatgtaaagcctatattatcaaaacctttggtggcacttgatttagaaacaactggattggatagtactaaagcagaaattatttcaattggagcagccaagataatgcccgacggacaattactgcaatttgaaaaattaattcgaagtgtggattcagtaccatccaaaattactgaacttaccggaattacttcagaacagttgcaaaaacagggtgttgagctttcattaggattagaggcattgtctgattttgttaaggattcagtcatcatcggttataatcttgaatttgatgaaaggtttttaacggaagcattgcggaaagttggaaaaaccgaatttactaactctacccacgatcttatgccaatagtaaaaacaactcaggagtttttagataactatcgtttaacgactgtcttggaagtatatcagatagagaatttagatccacatcatgcattatctgatgctcaagctacgttgtctttagcagagaagttaataaaaaacggcaaccttgtaatttgaaaatgcctatgtaaaggctttttttagtgtgctccccatatacatggggatgattccagcacgttcatggcacgcccaccttgcacaccgtgctccccatatacatggggatgattctggatcccgcacgattcttgagaaactgtctccgtgctccccatatacatggggatgattcccgaggcgctatcatcaattcaaaattcacttggtgctccccatatacatggggatgattcctgaaatagcgtcccgaacggccttaataatatgtgctccccatatacatggggatgattctaatagcaatacgaacattttcttcctcctagcgtgctccccatatacatggggatgattctaataaaactaagacggctgttatgaaagaaatgtgctccccatatacatggggatgattctacaaaaatatattatttcgggaatataagaaagtgctccccatatacatggggatgattctaatgctgaaaatgccggactaatcaatgctgagtgctccccatatacatggggatgattccaagtccagcgacgactgcagcaattgcagcaagtgctccccatatacatggggatgattctaacggatgggatggtattatcgctgttgctcagtgctccccatatacatggggatgattcccgctttggctgaatctaaaagtgcttgttcgtgtgctccccatatacatggggatgattcttaacaggcgacttcgcacagcttcaacaattagtgctccccatatacatggggatgattctagtatgagtgatagaaaaattgtactaacccagtgctccccatatacatggggatgattctggtacagacggtggaacttggatgaactacattgttggtaccactgataccacaaagagacattatgtggcaaccatcttgctggatgggttttcgcagcaaggtgtttatatccgccttgataatattccttcgacatccactattacattttcaaatatgaaactgcaattaggtttaaatgtggtggtctccaatctttctcaagccgtggatggtatgcgacttgatatctctaagaaaattgagcagaaggatctcaacggatatgcaacccaaacgtggacactggatcagattaagttaatttctgattcaattgcttcgttgaaaacaaaaattgacaatcttagtcaatgaaaacaataagaagtaacatccacagctataactgatgggtcaaaccatcacagcaacagacgatacaggtaagacagtaaaactaaagattacaggaatcagctaaaaagctagttccttttttttagtacaaaaatttaggagatgaaatatatatgtatggaacaccagttttactaccacacgcaggctttaccgattggcagtttgctatcgaacatatgggaagcaacactttactaaatacactatttattttaattattgctgatgtgattacaggaatagcaaaatcaatcatcactcatagtgtggatagttcgatcggcaaaaaaggattagcaagacacttcacgattattctgttggtcgcattgctttatccatggtcactagcgattaactaccaatggctaggtgactcagttttaagtttgtggacattcatgtatgcaacttcgattgtagaaaatatcggacaaatgggattgccgctaccgaagtttattaaagacaggctaaataaatttggccaagacatggaagattaagaaccaaaacaagaaaacgataacgtaaaggagataaataaatgaattttaatatcgataattcttacgaattaggagctaatgaaggctcatctcaagcaacaaacaataaatacattgtcctacacgaaacaacaaatatcggtgccaaagctaatgcaagctaggctcctatgtcaagaatccggacataaaagtacgaacaaatttgactttcaatttaaattacttaattacacatttggtttgtcgaaactttgttcagttttcaaaggtctacatcagatattagttaatcactcattaaattaaaactcataagcaacacaatctatcttatcatgtataaacccgaatgtcaacaactttttttaagtaatattcattcaacgttttgctacatgctcatctctcgacgacatagaatatcttaccatcctagtgggacaacgtcaatcactaatttgaaaaaaattcaaaaaattgaattcctgtataaatatcgaaaaaataattcatatcacccggattctcatccctaatctgcgctattgattatccctcataatacttttaaactgctatttgttccaattttatccaaattggtataggtaaacaaaaagatcctgcaaaattcgcagaatcttcacgtcctaatagaagtcttctaggttttcatagtctaatatcgcaatctttcgaccgtttcgttcaattagcgcatgactttctaactgttttaacttacgcgataaggtttcaggcgttgttccaatatatgttgccagttcttttaacttcatcggaatcatcacttcagtttctccgctcgctttagctaaatcaagtagataagtcacgattctggattcaactgactcgatattgattaagttcgcctgtttttccaaacgcgtcatcttatcagtagttgcttctagtaactttaaactaatttcgggataggctaacagtaactgttgaaaagcactccgcgataacgtacagattgtactatcttgcaagacctcaccgtacaacggctcatcttccgttttaaaaagtaacttttctccttcaaaatcaccgggttccatcatgcgtagcagttgctctttgcctgctgtagagagctgatagaccttaatgctccccttagctaagatcactaaccgcttctgatccatcgggttcatcaccaacgtcccttttttaacgcgttcatgatgggtaactgccgaaatcttgaccaaactatcacggtctaaatgattaaaaatcggtactatctcagcacaaatatgttgttcgtcagtcacctagcccacttccctctatcttaatcgtcgtcttcttcatctaatccttcgcgcgctgcttttcctagttggctttgcaattcacggatttggtgttggttgtagcccattaaagaaaccatatccgccgctaaagcaaatcgttcttctttttccgcaagtttaatcgcacgggaaacaaatagattagcagtattatagtccgcaaccatttccgcaatcatcgctggcatctcccagtacttaatccgcggctcttctgtcagcatcccatactcggtatactcagcttgcgtcgtcggaagcacttcaccttcgtctagtagccgttcggccgtcttgtctaatagcatatcattttctgcaagcaatgtggttaattgcgctttaaaagcttggttattgattcctttagcgtaccacttcatttgacggagtttacgccgttgaatcgttaagttagccatcacatggccgatcatggcacccgcggttggtgtatggtgatcaacatcagcttgtttaacttctgcttggtaacgtgtttcgatttcttcattagataacatattaattgccccctatttcactttgatactttgaacgctgtagcctaagtcagttacagcttgtgttaattcatctgggtttgtcacggcttcatcatattctgctttcactttactagcattaaagagaactttcactgattcaaccccatcttgttgactgacacccgcttgaatcttttgcatacatgacggacatgatagctcgtctaattgcatcaccaattttgccatttcaatgaccaccttttcgtttgattactgttactatatcgcgcgctgcatgattaaaaattgaccgccatcaagtttagcgaactttaaaccgaatcaggcgcatcgcattgaaaatcacgaccagaatactaatctcatgaacaaacatcccactagccatctgtacccagccaagcatcaggccaagcaataacaatccgaccgttccaacagcaatcacaatattttgaactgtattacgtgccgtcgccttcgtgaggtaatcggcatacactaattcggataacgtcgattgcattaacacaatatccgaagtttcaatcgcgacatctgtcccagaacccatcgcaattccaatgtcagccagtgcaagcgaaggactatcattaatcccatccccgataaaagccactttttgaccgtttgcttggtaggtcttaatgaattcaaccttctctgccggcaaaagattcgcgtggtattcagtaatcccgacggctttggcaattgctgcggccgtctggtcattatcgcccgtcaacatgactaaatgtttaacgcccgcttttttcaaacgcgttaatgctgccttggcttccggtttaacagtatcagcaatcccaattaataaaacaacttgttggtcaactgcgactaatacggttgattgccctgctgtttgactggccgtgatcgccgcaatctgcgcaccggttaaccggatccctgcttcagtcatcatcttggcccgcccaatccgaattgtttgaccagcgacttcagcttgtacccccaaccctttgagcgtttcaattcgttcaatagttggtaagtctgtcaccccttgttcccgtgcatactgcacaatcgcagtcgccagtggatgatctgactgtgcttcaaccgcggtagtcactgccaacgttgcttgttctgccgctgtataaaattgcacatgtgcaactgccgtgtcccctttagtcaatgttccagttttatcaaagaccatcgtatcaatgccagccatcgcattaacgacttcgccgcctttaatcaaaaccccatgcttcgcgccattgccaatccccgccacgattgaaactggcgcaccaattactagcgcacctggacaaccaagcaccagaatcgtaatcgcgagtttaaagtcgcgcgtgattaagccaatcgctaatgccaacactaaaacggccggtgtgtaataggtcgcaaaacgatcaatgaatttttccgcgggtgacttactatcttgggcctcttcaaccaattcaataatttgggcaaaagttgtatcatccccaacctgcgttgcggtaaccgtcaatgtcccgttatccacaattgccccggaataaacagcatcacccactattttcttaacgagttgtgcttcgccagtgatgctagcttcattgacataggcactaccttggacgacttgcccatcaaccggcacctgagcgccagctttaaccaatacttgatcatcgatttcgacatcatcaacatctaccgtcgtagtagtgccatcggccgctaacacttgtgccgtttgtggcgccatttcagacaatgcgcgaattgattctcgtgtctttttcaaggttcgttgttcaagatagctcccgaataaaaagaggaacgtgacaatcgccgattcattgaactcaccaatgattagcgctcccaataccgcaatcgtgaccagcaaatcaatgctgatgactttcacttttagcgcttgatacgcctgcatcaaaatcggtgcaacccccatcattgacgcaaccaataacagcccttgcatcacaattaccgccccaccaagccaataccagccataggccactgcaatcaatccgccaacagtcagcgcaatctgattcttcacggattgtaaccatctttgaaatttcatttaaaatcccttcttcctaacgattgtctttagtatagaagaaagccgattttaagaacttgatggttatcaagtttacccgaatataacagacaaaaaagcacaatcaacgattgtttcgtcgattgtgctttttcaattcgattaggcttcaaacccattttgatcagcgacttgcttgaaccaatgacctgattttttaatcgtccgttggcaatcatggtctaagtccaccgcaataaaaccgtagcggttcttataggcgttggtccatgaccagttatccatacacgtccacatatgataaccgagacagctactcccttcttggagggcttgatggacatacttcaaatgatcctgtacaaattcaatccggtagtcatcatcaatctggccatcggcattgcgataacgttcttcgccttcaacgcccatcccgttttccgaaatgaagcaagcaatgttgccgtaattttcgcggacgttctttaaaatatcgtaaatcccacgttcgtagatttcccacccgcgatacggattgactttcttacccggcatatcgtaattgtcgaaaaaatcatccggcatcgggccgtttgtatggtcgattggggtttccttggccttcacgcgccgtggttgataataattaatccccaataaatccacagtattcgccttaatcactgccaagtcagctggttgatagtcgggtaagatggctagatcttttaaaatcgcgaccaaatcagcggggaattcccccttcacggcaggatctaagaatgaacggttgaaaaaagcatctgcaacttgtgcggctttcacatctgccggattagtcgcatcccgaggataacttggggttaagttaaggataatgccaatttgtcccccttgattgcgtgcgtgatatttttgaatcgccatcgcactcgctaatgtttcgtgataaccaacttgtaccgcatgcgctaaattaatttcagctggataatggaactgatataaatagccgccttcaaccggcacaatcggttcattgtgtgtgaaccatttcttcacccgatccccaaataattcaaaacaggtttcagcataatgaacgtaagcatcaatcgtctcacgattgagccaaccaccttttttctggagtgctagcggcatatcaaaatggtataaattcataaacggttcgatgccgtttgcgattaattcgtcgatgtacgcattataaaaatcgacagcttgtagattaatctcccccgtaccttgtggaaacaaccgactccattgaatcgatgtccgaaaactattgtgtcctgtttgtttcatcaattggatatcacttttgaattgttgatacacatcagaggtccgcgctgggcccacttggttaaaaaacttttctggcgcttgttgataccaataatcccaaatattatcgcccttaccatcaccgtcaatccggccttctgtttggggaccacttgctgctgaaccccaccaaaaatcctttggaaagtcataaaaagtcatcgctagcactccttcttgtttgaatagcctcagtatatcagcttctttttaaaaaaccaactcttttatttaaatgtatagacttttcaaaaagagcgtgctatattgagaatgtaatcgattgcaaacacatgtaaaggacggtgctctacgtgaatacttttatggacacgcttagcaagaaaatcatgcctttcgcaaataagttaggccaaaatcgttacctaactgttctacgagacgcatttatgctttcattcccattgacgatgtttggatcaatcatcgtcgttatcactaacctgccatttttcaacgatgccaccaaagcgaccctaacggaactccttggtaatggacaaaatgccacaatgtcaatcatgacggtcttcgtcacattcgggattggttattatctttctaattcatatgatgtggacggaattttcggcggtgctgtttcattcgccagtttcctaatcctcaccccattcatgatgaccaccgataaaggcgttgacgttagcggtgttttaagtctcgatcgacttggcgctaaagggatgttcattgggatgattgcggcatttatcgctgcagaaatttattgccggattactaaaaaaggctggcaaattaagatgccagacggtgtcccacctgcagttgcgaaatcattcgccgctttaattccagctattttaaccttaaccattttcttagtcattcaagcggcagtcactggtttattccacgtaaacttgcacgacgtgatctatgaaattattcaaaaaccactcgttggtttaggtggcagtcttcctgcaaccctaatcgcattgttctttgtccaattgctctggttcttcggtcttcacgggcaaattatcgtcaactctgtaatggatccgatctggaacacattaatgctcgaaaacttggaagcttacaaagctggccatgctttaccacatattgtcacgaaaccattcatggaaactttcaccgtaggtctcggtggttctgggatgacattagccgtcgtcttactgatggcctttatcatgaagaaaaaacaataccgcgatgtcggacgtttggccttggcacccgctgtcttcaacgttaacgaacctgtcattttcgggttcccaatcgttttaaacgccacaattttcattccatggctgattgcaccactgattgtcacagcgctcaactacactgtaatggcaatcggattggtgcctacgccaactggggtttcagtcccatggaccgtcccaatcttcttcagtgggatgctcgcaaccaactcagtactcggcgggatcttacaactcattgacgttgtgctagtcggtctcatctggttcccattcattaaaatgctagatcgccaaaaagaccctctcgcaaactaaagattgttttaccccgttgtttccactaaactataagtagaaagcggggtattttttttgccaaaatacgaagaaattgccaacattattcgacaacggattaaacaagggcgctatcctgctaatacgttgttacccaatcaaaccgacttagttcaagaattcgatgccagtcgaatgacgatcaaaaaagcaatcacgattttaacgatggaaggactcgttctatcacgacgcggcgctggtacaaaggtgttagaccactctttttggaataaatcaacggcaccggcggatcaataccgtgggatgtcacgtgacttagccgacattggtaaaacactctcaagtaagatcatcacgtttgaggtgactttcccaacacctgagattaaagagcgcttaatgcttgctgatcaacagcccgtctacaaaatcattcgactgcggattatcgacggcgttaatagcgtcctcgaacatacctacatgccagtgagcctagttcccggattaactgatgatgttctcgcacagtcaatctacacctaccttaaggagaacctacacctcacgttcgcgggcgcctttcgtaatattcaagccgataaggccgatgaatatgaccagcaatatctggactgcgccccaactgatcccgtcttagaagttgagcaagttgtttatctcgataatggccaaccgattgaatactcaagaagccgcaaccgttatgatcgccgcggttatacattcttagacgttaagaatacttaattgcactaaaaaaagcctgccagcatttagctgacaggctttttctattgattatttttcgacatcttgtaatttttggttgtcgtctaattgtgagcgaccaccgttgccgattttttgtaaatgattcattcctaaccataatagcaagagtgctacgatgatgaaggctaagagaacaaagaatgattgaacaatttgaccggtacctaaaccagatgtaattgcttctctgagccctagaattgaatacgtcattggtaagaatgggtgaatgacgttgtagaagtggttcgtgatttccattgggaatgtaccacctgaaccccctaattgaagcatcaagaggaccattgctaagaaacgaccaggattatcaaatgtcattgataagaacataatgatcgacatcgaagcaagtgagaaggtaattgccattaggaagaattgtgctggatgatcgacgtttaatccagcaaccatcattaaggcaggttcgataattgccatcccgacagcgactaaagcgccaaccgtgattttacttaagaaccatgctgttgatgattgaccagtcattgagatcttccgaattggataagcaaagttgaagacaattgcgccaacgaacaatgctactgaaaggacgtaaggtgctaaggcatgaccgtagttaggcacatagctgtaatttgaatgtttcaattcagcaggtgcagcaaacatatcggctgtcttatccgttaattgaattgagttaacttcatttgcaccagatttcaatgcagatgctaatgtcttattaccatctgttaattgaccagcaccatctgttaacttagctgagttatccgttaattgatttgtaccagcagctaattgatcaacaccgcttgttaacgttggaatttgaccatttaattgaccaagaccattgttcaaggctgttgaaccagttgctaattgactgataccacttgtcaattgaggtacttgggcatttaaagcaccagtaccggcagcaagttgttgtccaccagctactaatttagagctttgagctgttaattgaccaacaccgcttgttgctgatttaacaccgtcagtataaccattaattcctgttactaaggtattaatctgtggtgtcatcgttgattgactagcaatccccattactttattactaatttctgcttttgaagttaattcagctgcattaattgctggcgtattattaggaccatttacaccttggtttaattgcgttgcaattcctgttgcttgagttgatgcagcattcaattgagcgataccagctgttaattgttgcatttgaaccattaagccagaaatttgatctcgcatttgttgattcgttaatgcgtcactcattgttaataattgttgtgacttcgtacttaattctgttagttgagcaacagcgttatctaattgacccatttgaccaagtaatggcgttaattggttaatcatccctgttatttgtccaacatttaattgttcacttgctgcagcaattgtttgcactgaagttaagtttgaacctgccttagcctgaatatcttgtaatgctttttgacttgcaggacttaagttagctgaatctgcactaattgtttgtacgtcagctaatgttgtctgcgagttaccagcaattgtattagctgaggtattcaatgttgtttcaaacgctgataattgagaacttaaagctggcaattgagctaacgctgctttattttctttataggcattatctaattgaactaataccgccatacttggttgcaattcgtttaacattgttgctaactgtttagattgtgcgttaacactcttcatcgttgcaggcatttgggcaaatttttgcattaaatccgtttgattgcttaattgagtattaatttgaccaattccttggttcatcactgaatttaaaacatataagcctgcgacaccggcgggaagttggcttgttgaagatgccaaacttgtggcacccgagctaagttgatttgagaagccattaagcgtgtttaaaccagtgcccaacgcgccaactccgtttgtataagctgtaacaccactactaatttggcttgcaccatcattcaattggcttgcgcctgatgcgagtgcacccgtcttgctatctaataatagtaagccgttgttaagtgtgtttgagccatcagctaattgtttaacaccatctgataatggcacaacgcttgttttcatcgtcatgataccatcgttgacttgagcaacaccggctgtataaacatttaaaccatctgataacgttacagaaccgtctgttaattgtttagcacccttggcagcagtactgaaccctttaccggcagtcttaacctgtttgaacatcactttagcgtaagcatttgtgacagtttcccgaacttgggcgttcaattccttggcacccatttcactgataacttcaccgatgaagttcaatgaatcgttggttttgtattgaatttgcatcttcttaggattcttatccaagactgtagcagcattggcagagaagttcttaggtagggtcactacagtgtagtattccttatctttaagcccttgttgtgctttttttgctgatacgaaacgccaaccaagttggtcgtttttcttcaattcttttaccatatctttaccagcgctcaacgtttcaccgttgtaagtggctggttgatcattattaacgacagcgactggtaattcaccagtgctaccataaggatcccagacagatttaaggaaaaagatactgtacaagaatggaataaacacgattgcgattaacgaaatcatgattaaacgattcttggcaatgaacttaaattcgttttggatcatcttcatgctaaaatctcctttaattatataagttgcttaattgattacattcaatatccacgataactaaattagtctaaccttttttcatttaaatttcaagtcttatgcgccaaactattctctattcacaactgtttctaatctaacaaaaaaagacggtcgttatttatataacaaccgtctcccttatggaagaaacaaatgacttcctattaaattaattattttgtttcaatcttcgtcatgccgcccatgtatggtaccaattgttctgggattgtgacgctgccgtcttcgttttgatagttttccaagatggcggcaactgtccggccgactgctaagcctgaaccgttcaatgtgtggaccaagttgacgtggccatcttcgtcacggtaacgaatttgggcgcggcgtgcttggaagtctgtacaatctgaacaacttgagatttcacggtacgtattttgagctggtaaccaaacttcgatatcgtatgtcttagctgatgtgaagctggcatcgccagttgccaatgtgatgacgtgatatggcaagttcaatgcttttaagatattttcagcatcggcggtcattttttctagttcattgaatgattcttctggtttcgtgaatttcaccatttcaactttgttaaattgatgcatccggattaaaccacgggtatcacggccggcacttcctgcttctgaacggaaagctggtgataaggcagtgaagtagattggcaattgtgcgccatccaagatttcgtcgcggtagaagttcgtcaatggcacttcggcggttggaatcaaagtcatgggttcgccttcgttggtcattgtgtaaacatcttccgtaaacttaggaaattggccagtcccaaacattgattcgccattcactaagtacggcgtaatcatttcttcatagccttctttagcatgttgatccaacatgaagttataaatggcccgttcaagacgtgcaccggcacccttatagtaaacaaagcgactacctgatactttagcggcgcgttcaaagtctaagatgcctaatttttcaccgatatcccagtgtgctaatggttcaaaatcaaattcacggggtgttgaccatttgcgttcttcacggctaaaactttcatctgggccaacgggtgctgaatcatctgggaagttgggtaagcggactaagatgtagtccactttggccttcacttcagccaattcgctatccaaagccttgatttcggccccaacattcttcatggcagcgatttgttcagtcgcatcttctttattgcgcttggcaacggcgatggcttctgaggcagcattgcgatttttcttcaattcttcggtcttcacaattaaggcacggcgtttttcatctaatgcgatgacctcatcaatttctgcagcttgaacaccgcggctagctaacttatcctttgcccattggacattttctcgaatgactttaatatctaacattgcactctctccttttaatgatctttaattaacaacaataaaaaaagccttctcatcccttaattgggacgaaaagacttcaattcgcggtaccacccaagttcacccactacaaataataggtgccctcaattactgataacggccaggaaccgtgtagttcatcactacccactattgcgctggaatgctggattcaataccttccaccaaccggtatctctctgtcaatccatataggcgcttattcacgtgtttacttcttaatgtaagaataccgcatttaatctttaaattcaatcatcaatagatgatttttgaatccatagaccccgtaataaaccgagcatacgtccaaaatgatcgctatctgcattttgatgccatttaaacatcaccgcttctgggttaacgatgccagttaaatcaatgctcgaagtcgtaaccaccatatcagcatccattaaatccgcgtcagattgactaacatccacatacaaaacactattcagtgcagtcatcaaatcaaagtacccgaggaaggattgttccgtcacaacgacaaccttcactttattcatcggtgcaaaccgttgaatcatctgacgcaagacgttgtagtaaccactgaccaattcttcacgtaatttgactaagaatgacactttcggattgattaataagtaatccaccgtatcatcaatattttattttaggacatcatttggcttgagatattcaacactttccatcatttggtcagcgagcaccgatgtcacatcttgtttaaacatgtaagtggtcatcgtcatcgaaatcatcgtttgcacgaaaccttgataattcgcatcgtctaagtttaggtatttcttgatatcaaatggaatttgatcaataaaagcttctacaaattcgtaaatcactggaatataccgcttgtatcgcgtttcgtaagattccatgtagggattagcatcctgaatctgaatcggtccaaaattaatgatgtcatatatattgaatgattcagccatcgcttcttcttgggtcatttgtgcaagaatgctcttgatccgtaaagcttggtcttcaaagggctattttagatattcagaaaccatattgggaactggataacggataaaatcgccatctagttcagttgaaaccgtgtgaccttgtagtaatcggaaataggttacgacgattgaatacgcccctagttcacgggtcaaaatattggttttttccaattggaaccgatcaatcgcaacatcgaacgccttaagtgcatcgtctcgtttaacatcttcaaagggccaggtatgcccttccgttgccatccagaataacatcgttaagactaaatgaattttactttcgtcgccttctaaccgaagtgaatcataatacatacggatatcaaatgagcgaattaagtcgcgcaccccttttaaatggcgtagcgccgttgccttactcgtatcatgggcttcccagaattcttggaatgtaacggtctcacccttgagtaagattttgataaaatcaaacgcttctgacttattcactaataaatagtgataggcatctgttggaacgctgaacaaggttttaatatcatcaacatccggtccgataatttcctttaggtccccaataatgctcatgtacatattgtacaagctaccgtaactgcgatttaatagcattgctacttgttttagattcacatcttcaacgagcggctgattattacgcgatagttcaatccgctttttaacaggcaactcatcccgttttaaaccaacaatctccattaataaggcgtacttatcattttccgcttgcgttagaaaaatactctcacttgcgttcaaaccgattccccctagtaaaaatccttataatttgaacggttgagaattttcaatcgttttttatttcggcccgttggtcaagtggttaagacaccgccctttcacggcggtatcatgggttcaaatcccgtacgggtcatcaataatgccggcttagctcagttggtagagcatcggtatcgtaaaccgagggtcacaggttcgactcctgcagccggcatcaatagcatgtttctaccaagtgctaatcgggataatcagcattgtactgacgttttgttagtataatgcttttttaatattcaatttgattgaaaagcaaccactaaaatagccagttacgaaaatcgtaactggctattacttattgttcatttgcccattgccataatagaatctgagtgcgtccagtcattttttcattggctaagatcgtctgtgcttcagcacgattaacccacagggtacttaaggcttcatccacttcaagtgtacggtctgtttgtttagcttgatcaagagtacagattgctagactaacggcgccatcagtaaggcctggtgaggaataacttggcgcaaagcaatgttcaacctcaataagagagtaacctgtttccgccattaactcacgggaaatggcttgtttaatcgactcagttggttcaactaaaccggcgggattaccatagacaaaatcattaaggggctgtctaaattgtttagtcagtaagacctgtgagtgattttgattgtagcagaacattgcaaccgctgaggcattagctggtcgttttaaagtctcgatggttaagttagagtcacgactgacaaaatgataaggcattaaatcgccgtgttcattttgatacattgcttcgtagtaagttagccaacgatcaggtcgtaatggaataagagatgttagtgtaaaagggttcatcggaatcagctcgctttctattagttcattgtactactgtttaaaggcaacaaaccagttttctaagaacatgttaggtatcatgagcattttctcatttaagaataagcattagtcattttgaatcataaaataacttattttaatgaaaaaatcagtgcaaacaatgcagttaatgttgaaaaaagaattgatttaagattaaaataagattataatagcccttatagattctaagcgaatgataagagacttcttgtatagatgagtcgattcaatttaataactatcgaattcttagtttccgtaataataaagttttaaagtggggtattacaatggaagagaaacaagaaaaaacattctttgggcaaccgcatgggctatcaacactgttcttcactgaaatgtgggaacggtttagctactacgggatgcgtgcaattctattattctatatgtattttgctttagataagggtggtcttggctttgacaagacgactgcaatgtctgtgatggcaatctatggttcgatggtttacctagccagcgttgttggtggttggttaagtgatcggatctgggggagcttcaaaaccgtcttcatcggtggtgtcttgattatgttaggccatattgccttagcaatgccgatgggtgcgacagctttatttatttcaattgctttgattgttgcagggactgggttattaaaacctaacgtttctgaaatggttggtagtttgtatagtgaaaatgatcgtcgccgtgatgctggtttcagtatgttcgtcttcgggattaacttgggctcatttgtcgctccaattcttgttggggctgtcggtcaaaaaattgattttcacttaggcttctcattagccgctgtcgggatgttctttggtttaatccaatactaccgcggtcgttctcaattcagtaaagaaaattcaaaacctaatgatccaattgcgccagaagaattatcaagcgttattcgtaaaattgtgattggtgtcgtggtcgtcgttgccgtagtattaggcatgcaatttacaggcaacttaaacattgataacatcgtcttgatgatttcaatcattgcgattgcattaccaattgtgtacttctcacggatgttgggcagcaagaaagtgactaagaaggaacgttcacgcgttatagcttatattccactctttattgcagctgctatcttctggggaattgaagaatctggctccgttgttctagccttatttgcagaagatcggacaattctaaacattggtgggcatagcttagctgcatcaaatttccaatcattgaatccactatttattatgcttctaacgccattctttgtatggttatggagtgcttggaagaaacaaccatctgcacctggtaagtttgctgttggtttaatcttcgctggtttatcatacatgtttatggcacttcctggattattacacggtaccgctggccgagttagcccattctggttaatcggttcatggttcatcgttgaaattgctgaaatgttaatttcaccaattgggttgtcaattacaacaaaattagcgccaaaggcattccaatcacaaatgatgagtatgtggttcttagcagatgctgcgggccaagcaattaatgcacagcttgtgcgtttatattcaccacaaacagaaattagatatttcttagggattgggattgtgagtgccatcttcgggatcgtcttaatcttcttcgttaaaccaattcataagttaatggaaggcgttaactaaatattagaaaaaatcttgattatttatgcaataatcaagattttttttgcattttggggttgatttttctgtcagaattttgtaaactaatatagttgaatcgatgagatgaaacgtatggaggagtagcgaagtggctaaacgcggcggactgtaaatccgctccttcgggttcggtggttcgaatccactctcctccacttgattgggctatggccaagcggtaaggcaacaggttttgatcctgtcatgcgctggttcgaatccagctagcccaatactttaaagacatcttgctaagatgtctttttttgtgtcctggattgactttcctccgctcgttcggtatccttggataaataaaaaaaggggtggcagaatgaaaattggatttattggtgtcggtaacatggcacaagcaatgattaaaggcttagtgaaagctaatcaagtcgcaacaacggatattttagtgcatggcggacatccggcgaactatgcggattttgtagctgaacaacggattacagctgttgcggataacaattcagtggttgaacaagccgacatcgtttttttagcggtaaaaccatatattgtgccacaggttttagcagaaacaaatgcagcctttaaagcacatcaaccattgatggtttcaatggcagcaggtttatcacttgataaattagcagaacaatctgctgcagatttaccaattctacgcatcatgccaaatgttaacgtggccaatcgcgcagggataacagctgttgttggtaacgaacaagtcaatgcagagcaattgggtcgggtgaaggatgtccttgcacaactggggggcgtggttgaaatcggcgaaaaagatttcacaactttcagtgcgcttgccggtagttcaccagcatttgtttacctattcattgattcaatggcgcgggccggcgttaaacacggtttaacaaagaaagccgcaaccgaaattgcagctcaagccgttttagggagtgcccaaaacgtgcttatgagtgatgattcaccttgggacttagtggatcaagtttcatcaccaggtggtacaaccgttgctggcttgttagcaatggaagaagccggcttaatgacagcggtggttaaaggcatcgacgcaacaattgcgaaggatttagaaagccaaaaatagagtgctctcaagcatgtaaaaagcgtaacctgatacaaatactgtattgggttacgcttttttatattattttgtaaagtggaccatctcatgacagagttggtgggtgagtaagctactttctagtgggataggatttgcgccgttagtttcaagggcagtaataaacgcatcaatcattggcgcaaagccccgcgtttcaagcgtaggcgtccagtcagctgcagtttgaatacgactgtcttctgccgcttgtgttgtgtagcgcgttagattatcgacagtgaataacccgtgtggtgtctggagacttgcaatttcttgattggtaccactttgcatatttaaagtcgcgctgattaattggcgcggtgtttcaatggttaattgcgcgagttgtaaattgccgtttgcatcctgctgacagtatggacggattttgtaattggtacctagtgaatcagccaagaaaagcgccgtatcaatggtatgaatcatcaggtcataaatggcaaagggcgttggttggctcgttgccacgcgtgttttagtgatgttgatcagttgtttatcgggtaagtgatttaatttttgcaaaaatggggcaaaacggcggttgaagccgaccgttaagagccgttctttgctagccgcgagtttgtataattcggcgacttccagtggattttcacttaagggtttatcgacaaaaacgtgtaaaccatggagcagggcttgtttaacatattgatagtgggttgcagttggggtgtgaatgaaaactgcgtcgagtggttgttcgagtaatgtgtcaaatgataggcagccactttctaaatgatattgcgcttgaagctgcgctaatttagccggttggcgcgtacataagacccaatcaacccggtcttgcatctgcgccattacaggtaaatatgctttttgtgcaatgtttcctagtccaataacaccgatttttaacatcgttaaactccttaatatgaatggataaatatagtatagcaaattaacaagaaaacggttcaaagtttagtcggaatcccttgtttttttggtctataccatttatactagaggtaatttaaagatagaggtggatggataatggcagtaaaagtattaaaacatgcggtaatctatacaggtgacgacgttatcgaagacggttatattcgtttcgatgataaaattttggcagtgggcccaatgttcgactacaaggcacaagctggcgaagaaattcaagacgttaaaggcaagacaatcattcctggctttattgacgttcactgtcacggtggttatggttttgatgcaatggacggcgatgctgaccaaatcgacgaaatggcaactaagatgatgcaaaatgaaggggtcacaaccttatttgcaacaacgatgacgcaatcaaacgaaaacattgctaatgctatgcgcggtgttaaagcagcggctgaaaagaacccattaattcaaggtgttcatttggaaggcccattcatcgcaccaatcttcaagggtgctcaaccagaacaattcatcaaagatccagacgttgatttattggacgaatggaataagttatcaggtaaccgtgtccgtttaattacttatgcaccagaagatcctggttcaaaagcattcgaagactactgcttagcacacaacatcgtgccttcagttggtcatagtaatgcaacgcgtgaacaaatgcttgaaagtaaagcaacgcacgttacccatttatacaatgcccaacgtgaattcaagcaccgcgaacctggcgttacaggtcacgcaatgttagaagacaacatgtacgctgaattaatcgctgatggtttccatatcgtgcctgacatgattaaattagcttacgaacaaaaaggtgcagaacgcatcgaccttgtgactgattcaatgcgggctaaagggattgctgaaggcgaaagcgaattaggcggtcaaaaagtcattgttaaagacaaacaagcacgcttagaagatggcactttagccggatcagtgttaacatatatcgatgccttcaagaacatccaaacattcacaggttgtgaaacgtttgaagccgttatgatgtcaagtgtcaaccaagccgaagaatttggcttaacacaaaaaggtaaattagaagaaggtcgggatgctgatttcaacatcttagaccatcagcaaaacttagtcgcaacttacagctttgggaacggctatcaacattaatatttaggagtgtgtcccatggaatcacctgtttatattcaaattcataatcaacttaaaaaggatattgaagccggcaagtggtcgattggagatcgaattccttcagaacgggagcttgctttaaatttcgaagtctcacgaatgacattacggcaagctgttcaaacattggtcgacgaaggaattttggaacgccgtattggggctgggacatatgtcgctaaccaaaaggtgcaagaaaaaatgtccggcgtcactagttttaccgatctaatgactgcccaaggtaagcagccatctagtaaaaccatttcgttccacattgccaacccatcacttagcgaagctgaaaagctccagttaaaagatggcgagcaggtgctccgcatggaacggattcgctatgccgacaatgtgcccatctgttttgaagtggcaaccgtgccacaaagcttagttgccgatttcagtaaagctgaaatcacgtcttccttctataaagcattagccgaaaaagggggctacgaaatgggcggtgcacaacaaaccgtctcagcccaactcgcctcagaacgaattgccgaatatctcgacattaagcgtaatggcccaatcttgaaattacgacaagtttccttcttatcaaacggcgaacctttcgaatatgtccgcacccaatatgtgggcgaacgatttgagttttatttggaaagataattaaaacgtcctgaaccgataaggttcaggacgttttttttgattaatagccaataaatgtttatatgattaataatgctgaacagactgtaaaaatattaaagtttatgttaatattctacgtggaagttaattaaggattctagaggggaaaaaatgaatagaaaactaacgaagttcttaattggatttacaatggtctcggcgacctttttgtttgctacaaacaatgttcaagctggacaagtgctaacgccagatgaaatgaaaacgcaactaaatagtcaagatacaaaagaagcaacacctataaaagagaaaaaagcgaagactgacgatattgggatgcctattgattcatctaaggttaaaaaggcgattatgcctaaagcaggttatccaagtgtcaataattatatatatcaacacaactacttacatccaaacattacgcaagatttgcatacattctcaatatttaattataaaacagatgataatcgtcctaacggagtggttgttcattatactgataaccctaataattatagtgctcggagtgaagcagactatgagattaatggtgggtggcaatcagcatttgttcatacctttattgatgctaggacaatattaaacattcatgatacagattatggtgcatggggtagtggggcagttggtaataaatattttgcccaatttgaaatggtaacggctcgtaacttcgaagattttgctaagacaacgagttactcagcgtggtacactgcttacttgttaaacaaatataatttaacgccatctttggcacagaatcataatggggttggtacaatctggtcacatcataatgttacacaatatcttggtggaacagaccatactgatccagatgcttactttgcaaaatatgggtatgacatgaatcaattttatgcattagtgcaacattattatgatcaaatgcctgcaaataaagcgagccttaacagtgttaatgtgtctgaaaatgaaattcatgtggtgggttggcatacagcacagcaaacagccaatcggccatatagctacctattcttattagatagtaagacacataaagaagtaaaacggtataaaataaatcgtgtaaatcgtcaagatgtgcataacatttatgaaaacattaccaattcattacattcaggatttaacaatacattgacattagataataatatgcataataggagttacgttcttatgtctcgctactcgtcagatcccaacggtaataccgacactgttgatttcacatttagaaatattattaaagtacctaagcaagaaaccagtgtagcaagtatggattcattaactgctgataagaagacattatcaatgtctggttggcacgcatcagtggattctagtcggtatccatacagttatttaattgtaattaatgctaagacaggccgtgaatataagcgctatgcaattaaccgtacgcaacgtgacgatgttcgacaagtttatccgaatattgccaatgcagaaaaaagtgggtttggtttgagtattccagtaacaaatgatatgcgcggtaatacgtataaagtaatttcacgttactcaagtacaccaaatggcgaaggagcatacgtagactattcgtttgataatcaggtaacagtaccagcaattgttaaacaaaatttagggagtattgacaccctaacggcaagtttcaataatgttcacatcagcggttggcaagcaaatgataatgcacaaggccgtaatgttcacactttaattgtaatggatgctaatacacataaagaaattaaacggatgactatcgccaactcaccaagaaatgatgtagctgctgcttatcccgatctatataaggcggggctgagcggattttctgcagatatcccagttgacagtcaattacaaggcaagaatatttacttcattagtcgttattcagcaacggcaaatgctgatgctgattatgtggattatcaattcattaatcaaattggagttcctaagaaacaagttattgaaagtgctgcaagtatggatcaattgtctcgtgtaaataataccgtaataatgtcgggatggcatgctgctaatgcttcgattaataaaccgtatagttatttaattattatggataagacaacaaacaaagaaattcggcgttataaaattaatcgttctttaagaaatgatgtagctgctgtctatccaacattatacggctctaaaaacagtggatttggtttaacgtttaatatcgataacagtttggttaacaaaagaatatatgtgattagccgttattcagataatccttcaggtgagggaaatacggttgattacgtgtttgacaatgccttgaacatctaaaaaatattgccgaacgtcttaaccgtgtggataagatgttcggtttttatttgtaactaaaacgaaatagtgttttaagtaattgtattgtattattagtatgtctgaaaaaactaactaggagcgacttgtgaagtgaaaaaaattgttaagaatagtattttaatgagtacgattggtttaattggcttaacaacaaatcaacgagtatcagcggctgaacaaaaacaagagacagcccctgcattaatgagcagtaatgaaagtattatatcagcaagtagtcaaagttctaaagaacaaaagccatctaccgataattcaactgaatccggtgtaattaaaaatagtgaatcagcagcagaaacaaagaacaaggaagaagttactgtaaagcaaaataatgaaattggtcctgggttttatgatgcgcctaaagtaagtcaaagaagtacgccagcttcaatgaatttattacgaaatacctccagagcttcaatgaatttattacgaaatacctccagttttattagtagtattcatgatggtgcaatttcgtcatggcgcaagtatggtgtattaccctctgtttcaggtgcgcaggcaatcttggagagcggttgggggcaatcgactttagcaacgtatggtaataacttatttggaattaagggaacatacaatggtcagtacgtaacaatgcccactcaagaatatattaatggtcagtggattacagttaatgcgcaatttagaaaatacaatagttggaatgaaagtatcgaagatcatgggaactttttggcagtaaattcacgatatcataatttgttgtggaaaactaattatcgtgaggtaacgagtcttttgaaacaagacggttatgctacagcgcctaactatgatactttgttaaacagtttgattgagcagtatggattaacaagttgggatcgagaagtaacggataatgtcggtagccttgatcaattaactgcaaatagcaataatatccttgcgcttggttggcatgcaattaatgatgccaataatttaccgtacagttatttaattctaattgataccaatacaggaaaagaacataaaaggattgcaattaatcgtggtaggagagatgatgtagcaaatgcctatccgtctattaacacggcagcaatgagtggtattaatgccaacatcccagtagactcaggaatgtacggacatacctatagggttatatcgcgttatgcacaattaccaagcggtgaagggagtgcaaaagactttgatttcggtaatactgtaaaagttcctgcgccaactaagcaaaatttaggtagtttggataacgttaaagttaattcaaataaaatttcaatgaatggttggcatgcgagtgattatgcacaaggaaaaaatacgcattatctgattgtaatgaatgtcgatactaataaagaaattaagcgcttgaaagttaataattcattgagaaatgatgttcatagtgtatatcctaatgtgtataattctggtatgagtggttttagtgctgaattagcggtggataagagtttagaaggcaagaatttctacgttattagtcgctatacaagtaccacgaatggtaacagtgattatgttgactatcaatttcctaatgttgttaacgtaccacaaggcccaagtaatttaggaagtattgatcaacttatccaaaatggtaatatcctccatatttcgggatggcatatttctaagaacgttcaaggcttaaataataattttatcatcataatgaataaagcaaataataaagaaattggacgggttcgcattaataggattactcgaaatgatgtcgcagctgtctatccaactgttgataatgcggcgcagagtggcttcgatattaaagtttctctcgatgctaaactgaagcagaagaatatttatttaatcagtcgttattccaatagtaatagtggagaaggccgatatgtggattatcaatttattaattcgttgaatattaaatgataaaagttgaaaaactttgtttatgtttaaaattgtagaaccctaatgagatacaagggatttgaaattttaagtgtaggcgaagtttttttatttgaaaatgttacgtaaaaaaattcaagccttatacgctaaaaagatgctgaaccaaattatcaaagaggtcaatgtcaaaccgctcgtttatgaaattgtcgatgcaagtgggactgaaaccgcggttttgctaagtcatgagcaatgggtcaaaatccaagccgcgttaaccgctaacaagtagcgtgaattcccgatttagacttaatacggtaactaagctgtaacatttctgtaatagttgaatgttacacttgttcttagttggaaaaccgtacataagttaagtatttttaaaaatgataaaggggaatcattcagtgaaaaaagtcagtcgattaatgttcagtgcactagcattcttaacaattgggtcaacaatggcggttagcattggtgcagtcagtgccgatgaagttgctgatacaaaagcatcaatgacaaaccttagtgctgaaaactcggctttattagctaagttaagtgctgcacaaaataaggttgcttcaatcgatagccaagtgtcaaataagaccgttgcaattgatgatgcacaaaagaacattgcatcaacggacaaagaaattactgaagtggctcaaaaaatcgttaaagttcaagctgaagtccaatctagaaaagctgttttaaaagaacaagtaattgcgcttcaaaaacgtgctggggatagtgtttctggaaatgtttacgttgacttcatcgtcaatagtgatagtttctcagatatggtcagtcgtgcttcagttgttggcaagttaaaccaagctaacaaggaagcaatggacgccgtagcgaactcagaaagtaaattagctactttaaaacaagaacaagtgactaaaaaagcaaacttagttaacacaaaagcacagttagaaaaagatcaagcacagttaacatcacttaaagcagatgcagaaaatgaacaagcaagtttccaacaagaagtggatggacataagacacagcttgctagcttacaaagtcaattagatgctcaaacagcagccgctgttgaagctgctaaaaaagaaactgaaaaagcaacaatcgcaccaacggttgcacctaaaacaggttcagacaatacaccagcaccaacgcctgcaaaaacaacgacagttgcgccatctggtgcaaacactggttcattagttggcaatgccttacaattcattggcacaccgtatgcatggggtggcgcacaacctggtggttttgattgttctggtttagtttggtacgctgctaagatggccggcattagcttaccacggacatcacaagaacaaagcacggttgggacaaaagtgtcattatcagaattacaacctggtgaccttgttttctggggtggcgttggttcagcacatcacgttgggatctatatcggtggtggctcatacgttcacgcaccaacagaaggccaaaatgtaacaacgatgtcaatgcaatattacaaacctgactttggtcgtcgtttataagattaaataaaagaataaaaaagtttggcgtctgcttaaattaagccgccaaacttttttatttatttaaatcctgaatagaagagtgtgaatgaatagtgacaaaacaactattagtcattacgggcgccacgggtagtggcaaaacaacggtgagccattatttaaaagaggcctttcaaattccacaagtggttacccataccacgcggcctagacggcataatgaagtcgacggggtggattattattttgaaacaccagacaccttggcacaaaagcacctcgttgaatcggtgagctattctggctatcaatatggctcttcacatgaagcgttagatttggcgtggcaaaaagcacagctgattagcctagttgttgataccaaaggggcacagacttatttagagacgttccccgaagaagcatcggtcttgttcttaacggtttctgaaacagatgcgttgattacgcgccttgaaaaacggaaggatagtcctgaagcaattcaaaaacggattcaaagtgctgaatttaagcgggatctgatgttaccgagtcatttaaatcaacgggcaactgtgttggttaacgatgactgggaaacaactaagcaagccttagcaacattaatcgcaaccctaaaaaattgatcattgaaaataaaaaggaagcctgtcgaacgcgttcgacaggcttccttttaacgtatggttaacccttatgcaaatgagtgttggttaaccgaattggttcgtttcactttataactgagtttttgtacggcttgttcaattgtaataccacttgcgctgattttttcattgttcgttgcagttgcgataaatttttgagtttgcgtatcaagtgaaacatgataccaattattagtttgactagtaaattccatcgtaaaatctcccttcaaatgactataaatactgatagaaggctaatgaagacgatttcttaaaaatcatctgaattacatcataacgcgcagcctgagataatgcaactattttgtattcggatttattaaaatttggtgaaatttagttgtgcttagctaacggttatgggattaagggtataatggtaaatagtgtggggtaacaactaaattgaagttggtagtaacaagcgccagcgcctgacaacctagaaagcatgtgctagaatggcgtatcgattaatcgagaggagcggatgtattaaatgagcgaaataaccactgccattgccgtattacgcgcaaatgggtacaaaattaccaagcaacgccgagagatgctacagtatttatcgggatatgaaaatcgctacattcccgtgactcaaatcgacgagcatatgcgcgccatttttccgggaatgagtcacaatacgatttatcgcaacattaaagattttgaacaacttggcttagtagaacaacaaacagagggtgaacaggcccacgttaaatatcaatgcgattttgaacatcgccaccatcatcactttatttgccgccagtgtggcaaagtgattgaattgaaaatgtgtccgttagatttttttagtcagcaaattccaaattgtcaaattgaaggtcatcagttcgaactctatggcctctgtgaagactgccaagcataatagaaagggagcgttaaaatggcatatcacacaccacccattattccaccagccgccattatttcgttaattatcgcaatgagtgcgaccaacattgtggcaaatacggttaaacctgttgaaaacaccaagacagagcagtcgtcatttgtttcaagtagtagtgcaaccacaggttcaaccagcagcatgaatacatcagaaccagaatctgagtctgaatcggaatcctcatcgacctctgaatcaaccgttaattcctcttctaaggctgtttcaagtcaggatcggacggatacggatgccaactcacaatcatctgatgatgagcagacaacaacaccacaaaatgatgagtcagctaacacgaccacggcaagcagtagctctgctaacacaagtagtagcgctaaagtggtttcaagtagtagcagtgccactgctacgcagtaataatttgttttacgcgcaataagggggacatttatcgtgttaacttttttagacattattaaccattatttcggttacttaaatattaatggtcgcgttaaaaatcgccttttttcagttatttgtttaattggtgatttttatcttctatataagagtgtgacctactttaaagctcaagcggttggacgaggtgtgattaacctcctcgtctttttggtgttattctattttgcagtgatgaacctgtatttctattatcggggcaaaaatgcggtcatcgatatttcaccgtatgttgaaaaagcgctgggtggtgatccaaacgcgccacatccactaaatggggtaaccgccaaaacgcaagtgatctcacaaattcaaccggccactggcttatttgaagaacaaaatctcttgcccgcgcaactgacaatggacgcggaacaaacccaacgtttaggatccttgattaacgaactgattgaatctggctatcttagcttgaattacgcaggcttaagtgataatgatatatatgaacaagcgcaacaattgcagcgaccaatttatgcgattgggaatcaagttgctttaccgttttatgaaatgaaacaagaagcagatcgttgggtgctctatggggggattaacgccattgccaaacaaccgttagcgcagattacgacggttggcttaaccccaatccaagacctagcccaagattatcaacttgcagtcgcccatacttggattacgggtggcccgaacaagatggccgggcgtagtggcgtgcttgaaggcaatgatccctatcaattagtggttcagattgcgtaccaagaacgaacaaagtagtcagtggaggaaaataggtggagattcataacgaattcttagatgtcaattattgttaccaatactacctactagaattagcggataacggcaattattacttaacagggtagattgtaaaatttttaatttatctttcgccggatttttaaactattccccgatttaaaattgaagtgcaacacttgataactagaccaattagactagcttaaaaggccatgaaggcctattcttattattaacgacaaaatcaacagataaggataggtgtcttcatgacccaaactaagaatatcatgcctaagcattaccaacaactccaatcttttgaacgcggtcaaattgagtccctgactcgattaggatttggcgttcgtcagattgccagccggcttcaccggagtcccagcaccatttctcgcgaattaaaacgcgggttaaccacccagattgattcccagaaacatcggtcatatcagggctactttgccgagcgcggggcggcttactatcgagaacagcgggccaagtgtcaccccaaaggtttactgcagcgggctgccgtgttcttcaagtccctgccgaaagctttaaaagctaagccacgagttttcagtgtcgacacgtatgtccactatttcaaagctcattacccgggctttccctgcccatcaacggctacggtctatcggtatatcgaggctggcaagctcccggagcttcacaactatgatttacccatgaagctacgtcgccgcgttaaacgcccgaatcaccgacatgcccgcctgaataaaaaacggcttggacagtccattgaagaccggcccgcagtggttcggaaacgtcaggagttgggccattgggaaggcgacttagtgaaagccaaacgggttgagtccgaaccagctttaatgacgttaaccgagcgagttagccggatggaaattatcgttaaattgcctgattaccgggcagagacttgccggcaagccctccaagatacgattgatgattacggtgcagaaaactttcggactatcacgtttgacaacggttcggaattcgctagtttaaatcaggttcaaggaacggaaatctactttgcccatccatattctccctgggaacggggcactaatgagaatgtgaatggtcaattaagagagttcttcccaaaggggtattcctttaaaaacctctcattagtggatctgcagttggttcaagacacgctgaatcaccgtccccgccgctgtttaagctatagttgtccagcggatgttatgccacaactggtttaactttctagaccaattataagaataggccattagtgttgcacttaacttgacaattgaggtttttaaactatttaaaatatacgcattttattcatccacaaatgttatagaattaaggcaatcaagtaagtgttttaatcctaataaaaatagtgggtacaataaaatgacgatttattatttaaaaccagaaaaaacagtcgataaaattatcaatacattgcacgctagtgttgctagcatgcaatattttgaaacgctagatatgatttgcgaaaaagttgagtttaatcttgatgaagccgcgctattacaacgaattaagcaactagccgatgattaacgcgcagatttggaaacccttcattcaatcggggtttcagaaaatgatatcgaccgtttaaaagctgcaggtttattattattcgttcaggataatgagattccacaaagctatgtgacgctcagtcggaaagcattagttggtttgcaagagattgcagtggcttatgctcaagagtctacacagctaacaatgaatattgattcaaaagaaattcaaagcttaaaagcagcttcagataagtttttcagaaagtatcaataagaaattgaaaaaagcccatcgacatttatgtcgatgggcttttttgtttgccgcaaagtagcgcttggctatgcttgaacgaactttttaacgggtcctaataggtctgggttgatttgtgcacgaatcaacgtgccatcttcttcatagctttgtttagtgatattggcacgatcactgaggtacgaaacagcttgcccttctgtgtatgggactaagaagtcgagcgttgggtattgttcaaagagttgtttgttaattaaggcaatcaatgcatcgattgctacttcgtcgcgagctgaataaacgatttggtttccgtctacttcaggatagcgcgtatctggtttcaaatcagctttattgtaagcctcgatgactgggatatctttaatgttgagtgattcaagggtttcttgtgtcgtttccatcatgtccaagtagtttggatctgagtaatcaaccacgtggattaaaagatcagcactcgctgcttcagctaaggttgatttaaaggcttgaattaagtgatgaggaagttttgtgacgaaaccaaccgtatcactcaacaggaatttctgttggttggggaggacgatttcgcggacactcgtgtctaaggtggcaaagagcatatccttttcaaaaacttgtttttcaggtgtatcggggttcaaccgttgtaaaattcgattcatagtcgttgatttacctgcattggtgtacccgacgagtgcgacaactggaatcgcatttttcgtccgttgacggcgttgtacgagttgttgttgatcgattttagcaagttcggctttgagcttcgtaatccgtttttcgatgagtcggcgatccaattcaagttgggtttcacccgccccacggttcgcagtacccccgccaccttgttgatccaacttgttttcagaaggatggaggcgtggtaattggtatttcgcttcggcgatggccacttggagttgcgcttcttttgttttggcacggctagcaaagatttcaagaattaattgcgtccgatcaagaatgcttattccgagttctttttctaaattccgaatctgtgaaggtgaaagttcatcgttaatcaagataatgtccgcatcttcagcgacggcgcgttctttaatttcttgaaccttccctttaccaaaataagtggcgtgattagcttggtcgatattttggcgaacgtcaccaacgacttctaagttatcggcacgggctagttcgcccagttcgcgcattgtatagtcaaaattaacttggcgttgactaacaccagtgattaaaacctttttaggttgcatataagtttcttccatgagatctcctttttgtgagagtgcgtcttcaaatggtcagccgttgaggattagcaatatctcgtaaatgagcggcaacgccgattgtttacgagatggcgctaaacgcagacggctatttgaagaaagcacgtttaagataagagtgcggcaccggcggttatctgctgaggattagcataggcagacgaaaaaccgatttgttggttatttggctgacgtagctaaccgagagcagatgcctggtggagcacgtttcaattgaaaaaaaggccatggcaaaaatattcttttgtcacagccctcagttaattaaatttaaaaagcgaatgccaacagaaatagccgcaaaatggccacatgattattcaattgtgattgcgattaaacaaacgttagttgacatgttgttgacgctcctttgatgtgaaatgggtggttacccaccttatccgttaagtgtaccatgaaagccattaaaaaccaaagttcgcctttagcgtgtacgccaataattaacactgttgtgggtgcccagcgtaattttatggtagaatgtaagcggttatcaaaatacataagagaatcgattgggggattgacgaatgaaaaatttagcattacttgatgttggtggcactacgattaaatatggtttatgggatggtgcggcgcaacaattgaccaaacaaggggctgttgccacaccaaagtcgttgaatgcgtattatgatgtgctgacgcagattgtggcggagtttaaggctagtgaccaagttgttggggtcgcaatgagtacgccgggtgcagtgaacaaggcgacgggtattattgaaggggccagtgcgctcccttatattcatcattttgaaattcaagatgaacttgaaacgcgctttgacttaccagtcgtaatggaaaatgatgcgaattgcgcggctttagccgaagtcggtagtggggctgctaaagggctaaaaaatgtgttgttcatggtaattggcactggcgttggtggttcagtgattgtcaacggacaagtccaacatggtcgccatttattcggtggtgagtttggctacatgatgatgaatgatggtcggattttaagtgaagtcgggaccgccgttcacatggctgaccgttataatcaagaggcacatactaactactcagggcgtgaagtttttgaattggctgatcaaggcgatttactcgcgcaaaaggaggcacaggtgctctatgataatctcgcacaagccatctataatttacaatatagttttgattcagaagcggttattttaggtggtggggtgtcgcaggccgatttcttggtgccaaatattgaaaaagctttacaggaaatactcaagcaagtcgatattgcgcctttcatgccaaccattcggacgtgtcagtatcataatgatgcgaacttgattggtgcaatggaagatttccgccgcacatatccgaatttagttgcaaattagactagtaaagaccgctttcaacatgtcataataaatattataaatgatattaggaggcggttaagatgcccacggaaaaacaagcattaaatcaaacgattggatttaccgcggcattagccactgtgatgggaacggtcatcggcgctggtgtgttctttaaagcggatcctgtgacgcatgcgaccggctccaccgggctgacaatgcttgcatggcttgtcggcggcttaatcacaatttgtgctggattgacagctgctgaattagcagctgcgattccagaaactggcgggatgatgcggtacatcgaccatacttatggtagtttagcggcatttttattaggttgggccgaaacaacagtctactttccagcgaacattgcggcgttgtcgattgtttttgcaacgcaatgcattaacttattcagttggtcagctcactggcagattccaattgcaatcatcgtcggactcagcttaacaatcttgaatttctttggttcccgggttgggggactattccaatccttcacaaccgtctttaaattaatcccgcttgcgattattattgtgttcgggttaattcatccaggcagcaacgccgttcatgtgtcattatttgacgtgacccggtcaaatggatcggggagtttcctgtcagcgctgggcagtggtgttctagcaaccctctttgcgtatgatggctggattcacgttgggaatattgcgggtgaattgaagcatccggaacgcgatttgccgcggtcaattttaattggtttaacaggaaccatggttgtctacctcttagtgagcgccgtcttcgttcttgtgttgccaatcaatcagattgccggcaatccgaatgcggcttcagaagtggctcgagtgctatttggtggtgtgggtggtaaaatcatcactatggggattttaatttccgtctatggcgggattaacggctacacgatgactgggatgcggattccttatgcgatggcgctcgagaatcggttaccattcagtcgacaactgcgctccctttctaaaacaggcgcgccggttgtcagtggtttagttcaaattagtatcgccatcgttatgatgtttatgggtggcttcaatacattgactgatatgttggttgttgtcatctggattttctatattctaacgtttatcgctgtgttcattctgcgcaaacgtgaaccagaattaaaccgtccgtatcgcacacttggttatccagtgattccagtcatcgccattcttggtgggattttcatcgtggtgaatacattattcacacagacgatgttaactttaatcggaatcggaattacattactcggattgcccttttattactatttaaaaaataaatatccagtcgtttaacacaaaaaacgaagttcgtgaattaactgaacttcgttttttttgtggtcaaaaaccaattgtagcaacggatagacgaaaaataaaatagttgcgcaaatgaattatcggcattaattgttgatttttggtagattgtaaaattaatccgaacgctgttcggacaaaaaagatcagcttcctttaaaatggtgtttaccacaaacccatcttttaggagctgatcttttatctagtataacctattccgaggccgaaaggtttaaccttttttgttaccatcagttttttccaagagagagtagtgattaacctgcagctattagctaatgagatacttagtgttactcaggatgtttacgtggcctatgaagaaccctactagctgtgagtaggattaagctaagtaaaatataatatagcgcatcgtaattaaaaagccgtttaacagtcccttatgggatggttaaacggctttttgctatgctaaggcgtcattttctgtttcctgataacgttgcaagatgtagattgctaggataactagaattgcaccactcatttctacccaactaaagcgggcatggaagaagatgatacttagaataaatgtaattacaggttgtacggcatcaacgatactgattacggttgatggtgcaaagtttaaactgtgtaacaagcaaagatatgcgaatacagttccaatcaaaataacggctaaaattgcgataataccggaagcatttaaacgcggcggtgcttgccagaatggtcggtggatattgaagagtaaaccactgatgaacatgccccaacctaaaacgagaattggtgatttttcattaacgattggtcttggtagcacaacgtagaaagcagctgttacaccggataagattccccagattaatgaattaaaaggaattgttaaagtatggatattgcctttcgtaatagaaaggaaaacgccaattaaagcaattccgaatgagataatatcaattcgatttggccacttacgtaagaaagcgagggttccaataacgataaacagaggacttagatattgtaaaatagtcgccgctgctgcattccccgtttggatactcatgaagaaagtatattgattacccatgataccgaaaagggcgtaagcgattagccaagccgttaatcgttttgatttaaaaatggagaagatatcttgtttgaacttaattgccccgataagtaataaaattaaaccagcgccaagcgttctaacggataggaaccaagttgcagggatcttttgtccttgcgagatgaattccaaaatagtacctgaaacgccccagagtgcggacgccatagtcgcccaaaacatgcctttggcgatgttttgcggttgagttcgattgttcattgtgcgccatccttttttgaaaatttataactatactattataagctaaatggcgtatttatgctatttgcaaaacttttttcattattattccccacaaaataataaatatggcagtgataaagcgaactggtcaacaaaagctaattaagttatgatgaataaaaaagtgagggattcagatgcaatacattgcgttattacggggaattaatgtgggtggtaaacggccagttaaaatgagcgtgcttaaaactgcgtatgaagcggctgggttcaccaatgtgcaaacatacatcaatagtggcaacgtgttatttgaagccccagaaacaggcttaacaaccttagcggcaacttgtgatcagattatggtggagacctttggcttttctgtgaatatcgccgtggtcacagctgaccagttgattcaagctgttgcggacgcaccaacttggtggggcaatatgccagatgtgaaacataatttaatcgtggcgattgcgcctaaaacgggggcggaattgagtgtacatgtaggggcaattaagccagcgtatgaaaaagttgccgtgaatggtccgtttattttctggagtgcacccgtgaaaacattcggtcggacgcggtggtcgactgttgctaaaggggacctataccagtggctgacaattcggaatgccaacaccgctcgtaaattagtggcactcgcacaggcactacgggaagcatgaagtggttagactcgcatcttcattaatattcatatatacttatagtaataatcaataaagaaatgagggacgcgatgcgcttatccaatttgaaacagacgattatccagatggggttgatcttgattgctctcgaaattattgcgattgggattcaactcttctttgccccccatgaagtagcagccggtggggcaaccggtgtggggatcttattagaagaattgatggggtggaagatatcaacagtggtgtttgtgattaacatcggcatgctgatacttgcttacttcttacttgataagaaaaccacgttaagaattctctttggtagttttatgctaccagtttgtttagctttaacgccccaaatgatggtggtggaagacaaactattagcaattattatcgggagtgttgtttacgctgccggaattgccttgttatatcgaattgatgcctcgagtggtggctcaacagtgccaccgttaattttcaaaaaatatttcaatatcaaaccggcattgagtttgctggtagttgatttactagtctgctttgcgaatgtgttcgtctctggttttgagacgttcatgctggcaacttgttcatcaattctgacgttgattacgatgaactatattgagaccgggttgaaccggaaaaaggtcctctatgtcatgagtaacgaccaattacctgaaattaaagcccatttaatcgaagaatctgatgtgggcgtgacgatttttgatgttactgggggctattctaatgacaataagcagatgttgatgctcgttgttgaaaatcaagcctatcaacacattattaatcgaattcatgaagttgatcctttggcatttacgattgtggctaacgtagccgaggtacgcggcggtagtttataaatttaaaaagggtcgagacaattgtctcgacccttttgtgtgttattgatgattaaagtagcgatcagcttttaaattattgatggtgagcatgataatcaagctgatgatatagagtgttgaaatgaagagcatcacggtcatcaccgaataatgatcaagtaaccaaccgataatcacgctcgaaaatccaccgatacagcggccaacgttcataatcacgttattggcggttgcacggacttcggatgggtagaggcgactgacaatcgcgccatagcctgcaaacataccatttgagaagtagccgacaattgcaccgacgaacaataaagcacccatgctattggggaaggttaagatgtaaacgcctgctgctgaagcaatcaggaataagacaaaagcaaaccgtggaccaattcggtctagaatccaaccgaaagtcaacatgcctgctgacatcccggcaatcgtcgctaacatccaagttgatgaaccagccacactgaggtgcatttgttgttgcatgatggttggtaaccagttcattaaaccgaagtaaccagcgatttggacgattgccattatcatcagcgcaactgtttggtaagctagttcgcgtgttttaaaaagagcgctaatctgaccttttggttgatctgattcagaagtgaacgttgtactttcgactagatgatggcggataaaaaaagtaatgataacaggtaataggccgaatagaaatagtgcatgccaaccaaattgtggtaagacccacgctgctagaagtgccgcggcaatagcgccaagttgacctgcgacacccacgaaggatgaaacacgtccgagctgtttcttagggaaagattcggctaagaccgtcatgccaatcccatattcgccaccagcaccgatcccagctaagaagcgacagagataaatcatgggaagggtgtgggcaaatgacatagccgctgtcgcaaaagcaaagataaaaatggtgtaagtgaatgttttaatccgtccaacgcggtcggctaaaacgccaaaaaaaacgccacctaacaacattccaatattggtaatcgttgcgattaatcccgcctgtgttccactgagatgtaaatctgcaatgatggacgatagggtgaaagacaagaacataacgtccatgttttcgagaccgaagccggccgttgttgaggcgaccaccttagtctggtagcttgttaatcgatgttggctgtgtgccgtaatagttttcatattcagttttcctccaaaaaggacgctctctgtcgtcccttattttgcttggtgccaatcttagcacaggaaagtagtctgtgcaagggtgttatggaaaaagcgcaagcgtcctttgtgatataattgagtttataaaatggctcttcagcgatggagggcgtcatggaggctattgaatgactgataagaaaaaacactttacttttccgagcgcctacacagtaattctacttgttttactggcagtgatgatcttgacgtactttatgccagccggaaaatatgcgagtttacaatataacacgacccaggaaaacttcactgtggtcgcacccaatgggcatgaatcgacagcacctgggacacaagcaacactgaagaaataccacgttaatacggatttagcgaagtttaaggatgggtcggtgtataaaccagttgcgattccaaatacatatcaaaaactcaatcagcataaaccaaacttatttggcgcgattaaacaatttctgaatgcgcccattcaagggttatctgaaacaatcgatattatcacatttgtcttaattctaggtgggattgtgggcgttgtgaataagaccggtgcatttgcggccggaatggcggcgctatcgaaacgtttgaaaggtaaagaagcctggttaatcgtgattgtaacgagcttgattgccctaggcgggaccacctttggcttggctgaagaaacaattgctttctatccaattctagtgccaatctttatggcagctggctacgatgcgctagtcgcaattgcggcgatttatctaggcagttcaatcgggacaatggcttcaacggtgaacccattttccgtcgtgattgcttctaatacggctggcattagctttacagatggtatgggactaaggcttgtaatgctgattctaggcacattaatctgtattttctacacgattcggtatgctgaaaaagtaaaacaggatccaagccaatcgctcatttataatcaaaaagcagaattggaaaaacatttccttggaaatagtgatgtcaatgaagtaccacggtttgatttccggaagaaattgatgttaattatttttgcggccggttttgtcatcatggtcttcggcgtgaaggaatggggttggctatttaatgaaatttcctcgttattcttagcgattacgtttattttggcgtttatttccggattatcggaaaaagattttgttagtgaattcgttgcaggggcttccgacctgttaggtgtagcccttgtgattgctttagcacgcggcgtgacgattattatggaacaggcacaaattagtgatacgctattgtactggttaagtagtggcgtttcccatatgagtggtgttatcttctcaacggtgatgttcttcgttttcattctactaggattcttcattccgtcgagttccggtctagcggtgctatcaatgcccgtcatggcaccgttggctgatgtagtcggtgttaatcgtgacgttattattagtgcttataactggggacaaggcattatgtcgtttatcacgccaactggtttggtcttggcctcgctggcaatggtccatgtaacgtttgataagtggttaaaattcgtttggccattaatggcgattattggtctattagcaattattttactcggtgttagtgtctatctttaaaaaacggtcaaaaaaggtccgccacaatcgtggtggaccttttttcgtgattagtaaactttaaatttcgttactggccagtagcggagtttgacaacgccttgaatcccgttgaaggttttagaatcatcactgacaaagcctacttcttcataccggctatcctttgaaacagtccggttatcacccatgacgaagtagtggtgggcagggactgtggaacgaccaagcacgtcctttaaatcaaagtttggcttattagtctttgggttgagtgtgaagtagtttgacccggctaggaaggttgttggatcttttttatagtcatttaaataaggctcactgacttttttattattaatatagagttgatccttgttgaagcgaacagtttcaccgggcatgccgacaattcgtttaatgtagaattcacctggtgaatcaggggccttgacgataacgacgtcgccgcgtttcagtttcgtatggcgtagtgcaatgacccgatcatactgtgtaaagttgggttgcattgatggcccgaaaatttgttcattggcaatgacgaatttaagcagtaattgcgcaatgccgaccatcacggccgctaataaaatgatttgtatagtggatttccaaaattcttttgctttagctgacatatcgcacatccttagaattcaatagattcattgtactacaattaattggtagatgacaacaaaactgtacagttccttaactatttaaacgatcttttaaattaggggaacgccgcgttatttatcacgggaaacggttcgtggtatactgaaagggattattttaaacgacaggaaaagtgagtttaacgcatggcgaatttagtaattgtacgacatggcgagagtttagccaatcaattaaatacttatactggttggtctgatgtgccattaacggctgctgggcgcaaacaagcacagcatgtgggccgacaaattcaagcaaccggaattcaattcagtcatgtgcatacttcgttattgaagcgtgcaattttgacgagttacattattctggatgaaatagaccaattggccattccaatgacgaagagttggcgattaaatgagcgccattatggggcattgcgcgggttaaataaggaaaagacgcgggctatttttggtgcgcatcaagttgcccgctggcggcgtagttacacggcggtcccacctttattgacgactttttcgcaggcccgtcgttatcgactagttccaccgatgagtcggccacgcggggagagtcttgcacaggcaacgcaacggctattaccttattggcaagatcaagtagtgccaggattacttgcaggccaggaccaattgattgtagcgcatggttctactttgcgtgcgctcattaaggtgatcgaacagatttcagatcgcgatattgatggtgtggaagttgaaaatggtgaagcactgtattatcgattcgatgctcaaatggtagtcattgagaagggacgattagcggactaagcggatggacaacaaattgaaaagaggactgctgttggtagggctcatcctactaattattggcggcacgatttatcatgaacggcaaaaatatgccgtccaaactcaacaaacccaacaaaaaatgaaacaacttcagcaacaattacaggcaacaaaacttgagttagccattcaaaaggcaaaaagtcatgaagccgggattgatgatcgaaccatcaatcatttgagtgcgaaggaacaacaatttgtacagcagttgctacatgataacagttttagcgggaccattttaattgtgcggcggaatcatgtgttatttcaaggtggccggggctatgcaaattttgcgactaagcaactgaattctccacagacgacgtatcagattgcatcgattcaaaagtcattaacggctgcgttattgatgaaacaggtgcaagccgggaacatcgatttagcgacaccgttaagtcggtattacccgcagattaaagaggcggatcaaattacgctgaagatgatggttgatatgcgttctggactgactgaattatctgcaccagaaaaagaattatcagatcaagcgcggattcaatatgcgcttgatcatttggctgttaaagatattggtcagcataattattcgccagttaattaccttcttttggccgggattttagaacaagtcacccataagagttatcgagagttagttggaaatcagttgataataccgtttaaattaacatcgtttaattttatgccaaatgaaacgaccggccaacaagcgactgcttatggttatcaacaagacggctatggcacgccagttagtgaaccaagttacgtatatatgcgtgagttagggaccggaaatatgtatgccacaacgagtagcctctttcgaactgaacaggcgattgttcaaggaaaagtttttaaaaaatcgttattaaaaacgctccgctcatcgactactggtgaatatacgggtggtgtttataattacaaagattattttacaagccatggggtcgaatctggattcgaatctagcttgcagatgagtcaggatgggcgttcaggaattgtcttattatcgaatcaatataaggccaatccttcaatcggacttctaacgaatcaactttataagcagttaattacgctcaatcgttaaaaaagcagcttggcttaatgcctagctgctttttgtttggactgtaaaatgatgttgtgcaagtgtccaaaggccaaacccaattaaacagccaaaccagtttaagaggatatcactgagtgcgaaagtccctagataaaaggcgaattggagaatctcaatgcctagaatcgttaagagcgctatgatgttcgtttcaacaaatgaggctttcaaatggtacaaaccgcctaatgggatgaagtaaacgacattcagtgcggcttcgagcagtgttttgtgatccttttgaatgaaatcgaacgggttcaagctaactgcatgatagacgtttgctttagtgaataagacaatgaataataagagcagatagacgctgtagacgagataaccatagattggcgatagttgtcggcggtcccattgcacccagcccaaccaaaatgtaagggttaaaaatagaatcagaaaaagcgtcgttgctggaaaacgggccataacccgggttaagcgtggataactgttgagtgttggtaagacaatgtgccacacgaagtagcgacttatgaggtaggcgaccacaccggctaaaccatattcaagtatcttgcgcattacgattcctccagtgattatagtttggtttgggcgaggcgtttagtgaattcagccataaagtcaaaatgttgtgtgtcggctaacgtatcttctaatttatttagaagttcgttgagcgcttgttgttcgtcgggggttaggctaccgaataaagtctccgtaaattcattgcgaccatcgagggcttcttttaaaaccgctcgaccggccgctgtaatgaagacgtgggtgattcgccgatcatgatgatcgggccgccgattaatgtagtgtttagactctaatttgtgcaagcattcggttagggatgaaggccgaatatcgagactttcggcgagggctccctgcatttgtccgttttcgatattaaggcgttttagaatgcgaatttggctgactgagcgatgatcggatgaaaattgcatgccataataatggcgataatggtgaatcaccttattgaaagtttggaaaagctcgttagatagctcggtcatggggactccttaataaagtttaatttgagatgctaatacgggtataatacgtcatttcataaggtggagcaatattgctcaggttttatcaagattgttgtgaataattttacataataaccgcaaaaaaaacgatggttaaactgagtcagttctaaccatcgttttggggttgttattgagctgcctttaagaaatttaatgcagctgcataatctggttcgtctgtttgttcgataattaattcggtgtagctaattgtaccatctgcttccaaaataaagattgagcgttgaagcgtgttgttgcttggaacgtagagttgcattgctttcccgaaactgagtgcctcatcagaaaggagttgcatgttcttaacgccttctgcagcgcaccagttattttgttgttcgatggtgtttgttgaaattgtgtagaaatggacgtcttcgaattgatcgacggcttggttaaaatgctttgtttgaatgctgcaaacacgggtgtcaatgtctggcacgacgctaattaaagtccgtttaccgagcaattgcgcagaagtcaccgtttcgccagcggcatttttaaggtcaaattggggtaactgtgtgccgacggctggtggtgtgccgattgtatcgagtggttgatcatgtcttgtgatttgcatttgcataaacctcatttcataataaaagatgcttttattctaagctgattgtgctgagaacacaattaatcacgctcgaggagtatagaaaattcaaaataggttatactagacaaaagatcagctcctaaaagatgggtttgtggtaaacaccattttaaaggaagctgatcttttttgtccgaacagcgttcggattaattttacaatctaccaactcaaaaaaatcttcttttgataaaaaagcataaccggttgttctgaaaccttttaacaatctaaaagcggttttagcataactgcttcgaagatctctaaattccgctaaagcatatctaacccacgtgtctaaattgttaagaagtggcaaagcatctttatatacttcaatgtctatataaggagaatcagtttcaccaacaattctgaatttagtaaacataacaaacatttctctatttaatccagatttactacgtcttccaaaatgaagtcccattaacttttcataagttctttgaatatcatcttcaaagcgattatttgcagtcggtttgtagttgctcaaatctttaagttgttcaaaagaaaatctaactgtctgatctcccttatcacgcatacgagaaataattgaaaaaaatagattcatttcaataggggtgaatttacgtaacggaatggtattaagttcaggatcatattttataagttcattgctcataatcacacctccacaactattatataaaatcaacgattgtttatcaacgatcaccattaaaagcctcgttgataaacagacaaaacctcgttgataaacagacaaaacctcgttgataaacagacaaaacctcgttgataaacttctgtgagccttggtagagtaaggcgcaagaggggtctaaaagaggtttaaaagaggtttataaaagaggtataaaagaggcaccgctgtacgagattaaaatctaaaacaaaaatacaaaggagtgagcccaaaaacgggctcacattaaactccactcgctacgcttcttgcgcctcactttgttcgttgcttaaaaggggtggcaagccacatttaatcgggcgctaacgccccgaacccccgtccaagctgagccagcttaaccgctttttcactcgccgttaggcaggaaagcaaagttttatagaaactttggctttcgccaattcagtgttaagactggtttagagctgtcaattccttatgctcccacgctacgctcgtccgctaccattgacagcaaacagttagtttttttgaatcttaacaagaatctaactgctatattcgtttttaagggccttatttctcgtttctagcgattttgagactgtttatatatatttataccaaagcaaaaataaaaagccctcagcaggcttttagagggctaaataacgaatccaggatgattaataatattttcttgtcttttttgcaaaatataagtgtataaggaatcatacaaattctttttaatctcgtcaggttcattgacagaagcttcaaacaattcttgaatatcaacttgccaaggatcagcaagcatttcaccaattggttttaatactttcttttcgtccatcttaatgactcctaacgtcaaaataatgctttcagtttaaattcacagatcttacagcaccgtcattcaaattttgttaccaagcttataaagattatctgcacaaagcaattaaaaaattttggcttaaaacagcgtaatctgcaacactttttaagtatctaaagcataacaaacttagttaagtgcaagtataaattgaattaaaaatacattcagtttaacaacagcaaaaactgattttatggttatcagcagaccgagtgaaacgaggtcaatgcgcacttacacaccacaattaaaattgctggtgtttgtgctaaatttcctgtatcagaagtcgccgttggcgacaactaaaaatccaaataaaactaaccaaaatcaatttgatctaacatactttcggtactggcttggtctaagcctaaataagctaaagtcatggcttcactggaatgatttaataagtgcatgaccaaaccaatattataattagattgtgtgtagacgcgataagccccggttttgcgcattgtgtgggtccctagataattaattcctaacagatcgccaaccttactcataattttgtagaactgtttttccgtgatatggcgctcagggtgttgaatggaaggaaagagccactcagaggctagtctatgatcaagtagccattgacggtacaataagagctctgtttgaactggtttaagatacaaggtattcggtttaccagtttttcgatcgtgaatgaacgcattttgtttaatagaaccgtccggattaaaaatatcggcctgttttaagcgcatgacatcactgactcgcagcagtgtcgctttgccaacttgaaaaactgtatagttacgccggccagctttaaagttgttgagtaaggtatcttgaacctctttgagaacgtttgaatctttgatgggtaagacaacttgttgcatagtttgagctccttaaaaaattgatttttagtacaaattaaagtacaatattaagtacaatgaaagggtggtaaatatgacattagcattaacacagagcgattttcgcgctaacttaaaaaaatatttagatcaagttaatgacgaagacgaaaccgtttatattgctcgttcaaatagtcgcgcagtggccatcgtttcacaagaaaaaatggattggctagaacgagcattaaaagctaaagaaggctcgttagaatatgcaattgcacgtgatcagttaattaaacgccatgttttacctgacgatgaaattgttgaatcagatgatgattattggggtcagtttaaataatgaaaaaactaagatttaaaccacgtgcaacctttaatgctgatctaaaacggttagccagtttagacaaatctattattgatgaagttcgagcagccattgacctgttgcttgagcagcaacaattaccaccagaatttgaagatcatgagcttaatcggcgaatgagcggttataatgaatttcatttacgagacaccccgaaaatcaaaacacccagcgaaactaacgatgtcctggtggtttatacgattgatacagatgaactagtcttaattggcattcgagtcggatcgcatgatcgtttatttcctggtcaaaatcgttctaaaaggtatcgaaaaaatgacgaatagaagaagtcatttttataatatgaaaataaataacccctaatatctacattatagatattaggggttattctttcaatatttttgagaggcgattttgtaaatgcgccatcaaaaatgcctcctcgaaaaaggttttccaagaccagtataacaccgttaaaaatctggcatagcctgttataccaaaataatattttggacaggctctgcgaggcaagtaatcgacaagcgattacagtagcgttttcccttccttctgggaaaactgttattttacagcgcctattatccggctcgtaaaacctccggcgggtcacgccgtgacagggcaatttaccgttgcatggtcgatttcatcgggagcatgtcatgcagaacgctacccgcgtcgggcaagctggtgtcagcttaaccacattaaaataatctgtaaacgtaagtgtataataaaaataaaatttataaggatggattaaacatggtagatttatcgtatgatcatttcggaatcactcgtaaaataacagaattggaagctgatatgcctaagaattggctcagcttcgtgaattctaataaaaacttgaactatatggagaagtttggtgtagtggctattttacaagcattacagtcttatggggggccaactaaagctgctcttgtcaaagaaaaggctgttgaatatccttattttacagatgcagatagagagaaaaagtctagtaatggtcaaagtcagttagattttagattgcagtggtctatgtctaatttaaagaaagccggattactttattcaccacagtggggagtatgggccttgacacagatgggagaagacgttgatataaataattttgatgtatgggacgatgtatactcaatatctactcctgtttggcaaaaaaataagctaaataatcaaaaaaagaaagatgaaatactatcatcttcaaatgtcaatattgccaatctggacgaagacattgtagaagaaacagatgattctgaattatggcgagatcaattattacagcgattgagtgaaatgaatccatataagtttgaagaattgattgtaaatcttatgcgaaaaataggcattaaaatggataccacttcaaaaacaggagatagtggcattgatggcataggttatttaagaacccctgagttgatgacatataaaattgtgttacaaactaagcgatttacaaaaggtccggttacaggaccagatatcagtaattttgctggtaccattagtggtcataatgcagacagagggatatttgtaacgacttctacctatacaaatgatgctgtcagtagatcgcgtcaaggagctaatttaattaccttagttgatggtgatgaattagtagatttattatttgaatatagagtgggcattagcgaaaaaacagtcgttgttatcaatgaaaaaatatttccaaaagattaatatacagtctgcactagtttgagataaaaagtgttagctttacccgttttttggtcgtggataaacgtattttgcttaatcgtaccatcggcgttaaagacatcaacctttttcagctgcatgacatcactgacccgtagtaaggtcgctttacccagttgaaaaatggtgtaattacgccgaccagctcgaaaactatccaacagcgtctcctggacacttgttaggacgttagaatctttgattggtaaaacaagttattgcaccataacctagtcacctcttttttaagcattagaatccaaccattataggcgttattttaagtataatctaaaaaacagcccctaacaaatcaacttggtttgttaggggctgttttaataggttttcacaggggcgatttgacatttatagaccctgaactattcttggacttcaaagtctggtaattcatcaatcaattcaagcgttcgcatacttactgttataacagtaagcaaaagattcaaaatatacttaggatcatcgctgaaatcattagaatcatctgtgatccctgacttattatctgttttcacttgatattgatcaataatccattcaatagcgggtcgaccgtttacaacataatcatatgctctttctggaatgtttttaatcgtgatactcttgttgtaaataatagtagtgtatcacaaattatggaaacacaatatacatatttttgtcaaaagttaggcgaaattttcagggagcagtagattaagtagtacaatgtagatatcgagttaaatggagggaattcaatgtataaagcggttgttttttttgatctagatggcacactatttgataatcaaaagaatgtttctgatgacaacattgcagcaattaatcagttacgagagaacaatattctccctgtaatttcaactggccgaaatatttttgaaattcaatatgtgattgacgctaccggtatcaattcattagtcagtgcgaacggtagttacgttcaatatcaagggaaaaagctaaaggctgagcaaattagtgatgaggtgattgaagagattttagcatttgccaaaaagcagggcgatgtgatttcattctataacaatgaagaatttgccttaacagctgaaaatgacttaactaaagttaactatcggctgttaagattgacgccgcacgttgagccggacttttacaagactcatgaagtcaatttcttgaacgtttttaattatgataaagataaactgtatcaggatgaattcaagggtgaattgtcattggttagaaataatcctcgctgtttagatacgatgaagtgggggatatcgaagcaaaccggcattcaagcactcttgaagaaagcgcaattaggggacattccgtcctatgctttcggagatcagctgaatgatttgcaaatgtttgctgaagtggattacccagtcgcaatgggtaatggtcacccagatgtgaaagccaaagcatcattcgtcactacttcaaatgtgaatggcggaattgtgaatgggctgaagcattacgggttaatcaaataacttacgatacgcaatcatttaagggcttcaccctgaaatcctcgttttggatttcagggtgaagcccttaaatgatgggattaaagcatcaattgtcccagttttccaaatggattgaattagtccatctgttttttaatgttagccaaggtcatttcactggtatcagtaaagttcacatctgcatccttcaaaattgtcttgtcaccaattccaatggaggtttccccagcggcgttaattgattcaactccagcggcagcatcttcgactccaatgcattgttctggtttcaaattgatcagttcggcacctttgaggtaaatttctggatctggtttgcctttgctcaaagtttttggatccacaatctttggaaaataatcagtcaattgtagcttcttcaaaacagtaggagcattttttgatgcagaagctaatgataacagataaccaccatctttaatttcatccaggaattctttaatccccggaagaatattagctggagtcattttgtcaaccaacttcaagtagtttgtatttttttccgttgcaagatcaaccttctgatcgtcagtatagtggtcttgtagattacctgcttttaaaatcatttcaagagaatccatccggctgattccctttaatccgtcttcaagttctttggaccatggggcacccaccttgtcagcaacttgatgccaagcttggctgtggaaaaccgaagtatccgtaattacaccgtcgagatcgaagacaaaacctttaatatctgaaaactttgccattgtatttcactcctaatcttatttgtaagtaataacagttggcttgttcttggataatgaataacccttgtcaccaaccttgatgtgactgctcgaatcggcagtcacattgattttatgatgaccgatttcaaaattgtacgtgatgccttgatacgtttgcttaaatgatagcttactccaagtggttggaaggtgcgggttgatggaaacctcgtcggtgtcaaaccgaaccccgccgtaacacttggtttcaatttcaagcgtagcacccatgacgccaaggtgaataccttcagcagtggtcccaccttggatatcatagtaatcggagaacaaggcggttgagaacaattgccaggatcgatccatattgccatccatttcatccagaactgaataaacaattcgtgaaagggtggatccgtgagtcgttcgatcaaggtaaaatcttaaattggtggtaaagtagttggcgggcaacttgtaaccaagccgggtaatgacgttttgaacttcatcaaatggtaattcgtaataagccatcaaagtgtcggcttgtttggcaacttgataggaatcaggtgaattaccttcaccctttaacagtcgatcaattcgcgatatatcaccgtatttcttccggtaagaatcaaagttgagcttggaaagattgaagtaaccggaaaattgaccaatgatgccttcttcgttgatatcgagacgaagtttgtgggcaatatcactcatttgatcaagtaaactattgtctgtttgggctttttcattggcagatttgattatcttaggatcttcatgactcatcagctctgcgactttatcaaataaccaagaaaccatgatattggtataagcattattagtgagtccgtgatcatcagagtttggatattcttcgtggaattcatctggtcccatgacgtgatgaatatcgtaacgatcatcttttttatcgtagcttgccatgctgacccagaacttgcaaattgacaataacatttctaatccgtagttcctcatgaattcggtatcacctgttagatgaacataattaatgacatcgtaggcaactgacagtgaaacgtgacgttgcaagcgactgttatccggatcccattcaccactaaccgggttcaagtgaacaaattgagattgttcatccccatacatccctgactgccaaggatacattgccccttgcttgtcttccgaggcggcgtatttgcgcgcttcaccgattcgattatagcgatataacaagcactgtttagcgattgctgggtaatgaatagcataaaacggtagatcaaaggtgacatcccagaagatgtggcctcgataagcttcaccgtgtaagccacgagcgccgactgaggaatctaattgaccagaagccaaggcggcacttgtcacaagcatatggtagatgttaacccgcgtcagtttttggctggtcatatcattatcaatttggatatctgaattctgccaaacgttgctccagaacttttgactgtcggcgagggtgtcattgaacgaagaagcgttcagttccttttgggcgggttgttccaagttggcatcctgagtttggctggtaaatactgtgacacatttttcaaatacatacgatttctcaggttctacttggatatccaatttttgctggattgatttatcttcagtttcagctgaaattaacttggtggtatcgatatctttgctagaaagcttagaattaatcacaaagttaacgtgggacgtcttggtttgaccggttaacgaaatctggttatcgcgggcaaccatgccaatgacgtcgatatggtgttgatcgaaaccctgatagcgctcaacattgccattaataacagtcccgtcaatttttgaatagagttgaatgctcccagaaaagttgattggttttaattcatacttgatggaataacgatgccaatttgtcatattggcaactttggtagcccgaacttgcaaaatgtggccagttgataattgaatatgcaaggtggttgttaaaacaccggttcgcaaatttaggcttcgataaatatcttgaatatcttcttttttaatttcaaacggttgttgatgatccaccccaaaactgatgtattgagcattggggaggtttactagatcttcgttgacaacatcccgaccgttaattttggttgtgagttgattgtagacaccagcaacgtacatcccagggtaattatcctggttggcgttcgcttcgacatacgcaccccgcaggccaaagtagccgttaccgattgtcagcatggcctcttgcccatagttacgcttgccgctgtactcaccataataatcaaggtgccacttcaaatattcctgtttttctgccactgctttttccaaaccaacatcttgaaccttatgcaggttaacgaccggaatattcatcatgttggcaattgctaggccaatatcgatcttttgatgattaataccgatgatcgtgtcagagaattcatagttcaatgaatcctcaataattgctgcatcaattggcaccccagtgagggcagccttaatgttctcaagattatcgccaattgaaaatttggggttgtaggtgatcataaacttcctaaaagggggcttattggaattctctgaataattgatttccatgaccccatcacgagcccttatcgcaaacgttctcataacaaaacctcttctcaagtatttccatttgtgaaaatcatttataagttaattctagttcaaatatccggtaatcgcaattaattggggtttgaaagtaatttgagcaagccggctgttttcatttttgctgattttcgagtagatctttgatttctgaaagcaggacttccttgcgatcaacactggcggttttgggctgttttttaactatccgattaatgatttatttgagctgtggaaggtaaacgcggttctgaatgtctcttaaaacctgtctcaaatattgacttcaatccagatcttttttgtccgaacgctgttcggacaaaaaagatcagcttcctttaattttaacaaaatgttaacatgagattttaaatattaacaccattttaacaccttttcatatactatatctttggttgatttaaatatgttttggagatgttcaaaatgattgataactattattacaaagattattcggaccagtatagtcgagaaaaagtaatttgtttaattgataatgatattaaaaaaaagatggggggctacattcaaagtacttcaggagaccttttcatagcagatgttacaattttttattttttcgatactgctcagcatcttaaatttgactacggattctcagacaaagttcctattagtgttagaaaattttggaaacaacgcattaacgtgatggagcacccttgattaaattaaaaaattaattggaagtgagacaaatggttttggtcttaggaacgatcttaacaatctttttattagcttatctaatttatgttctagtgaaaggagaatcatagtatgccaacatgggctcaatatttaccatatatcattgttccattattattagccattccattaggcaagtatatcagccatattattaatgatcagaacaattttatgagcagaattatccgaccaattgaaaacaaaatatataaattttttcgtgtgtctaatcgcgagatgagttggaaaacttacttactaagtattttaatgttttctttagttagttttttagttttgtttagtattttgaaattccaaaattatttacctgggaatccagaacatttttcggggctttcttggtcattagcgtttaatactgctgttagtttcgtaaccaacactaattggcaatcatattctggggaaatggctctttctaatttttctcagacgattggtttaactgttcaaaactttgcctctgcggctgttggaatcgcggttctttttgcattaattagaggtatccaacgtacagaagcaaaagcaattggaaacttttggcgagacttgaccaggatctttctatatcttttaatcccgcttagtttgtttatgtctattatgctcatggcaggtggtgttcctcaaacaactggtggttataaaactgctaccttggtacaacctgttgccgttgataaacataaccaggcgattcatggggctgaaattaacgtcaaaaaaaatacagttaggattaaaaatcacaaaatcgatggggcaaaaattataactaaagaaaccttaccgttattcccacaagcttcccaggtatcaattaagttattggggactaatggtgggggggtcttaggtgctaactctgcccatccatatgaaaatccaacaccttttacaaactttattgaaacaacggcaatgcttcttctgcccatggcgctatgttttagctttggtgaatctttaaagcggcgtaaggaaggttgggcaatcttctcagctatggcaattatgtttgtagttgcgttaatatttgaaggaattgttgaacaacatgggatcactttagctcatattggtaatttggctatggaaggcaaagaaactagaattggtattcctggatcagctgtttggagtattgttactactgcaacatctacaggcgcagtgaatgcaacattagatagttttagttctctgggcggattaatgcccatggctttaatgcaattaggcgaggttgtttttggtggtgtaggatctggattgtacggcatgcttggatttatcatcctaacagtttttattgctgggctaatggtaggacgtacaccagaatatttaggtaaaaaaattgggccttacgaaatgcgtatggctgttatcgcttgcctatcaacgccaattgcaattttaacttgcagtgctattccagcaatgttaaagagtactttaactagtcttagcaatagtggagcacatggattctctgaatttttatatgctttttcatcagcaggggcaaataatggttccagctttggagggttcaatggtaataccattattttcaatgttttattagctgttgcgatgatcatttctcgttttcttcctattatcgctataatggcgattgctggtaaaatgggacagcataaaattgttgctagtagttcgggaacattatcaactacaagtccaacctttgtttttatgttaataatcgttgtattaatcattggcgtgcttagtttctttccagcactatcattaggaccaatagcggactttttgacacattaatatgattttacattatgcgtttctaaaattagtaaggtgggtctgactatgaatgaaaaaatagagaaaaatcaaatgtttaaccgaaaaatgttaggagcggcacttaaagaaacttttcttaagttaaagcctaacctacaaattaaaaatccagtgatgtttctagtttatgtatcagcaattgcaacaactatcttatttattttatcgctttttggcatctcagacagaattgtaagtagtggttttatctttacagtagctgtaattctttggattacttgcctgtttgcaaacttttcagaggctgtcgctgaagggcgcggtaaagctcaagcggcagagttgaaaaaatcaaaacgtgcagtaatggcaaaaaggttaaataaagttggcgatttatcaaatattgaaaaagttagtggagaaaacttaaataaaggtgatctattccttgctgaagctggggaaaccattgcagcagatggtgaagttgtcgaaggagctgcttctgttgacgagagtgcaattaccggtgaatctgcgccggtaatacgagaagctggcggagatcgctctgctgttaccggtggtactactgttttatcagatcatttggtcatcaaggtaacacaagaacaaggtgctagttttttggacaaaatgattggaatggtagaaggtgctaaccgtaaaaaaacgcctaatgaaattgcactagaaatttttttagttgcattgtctatcatatttgtgttggtagtggcggtattatacacgtattctcagttatcatctcagatacttgatatgagaaatccaatgtctattgtatggttaattgcattactggtttgtttagccccgacaaccattggagcacttctttcagctatcggtattgctggcatgagtagattgaatcaagctaatgttttagcaatgagtggtcgggccattgaggctgctggcgataccgatgtattactcctggacaaaactgggacaataacattaggcaatcgacgtgcctcagcatttattccagtcgatggccattcagaaaaagaattagcaattgcggcacagctttcatccttagctgatgagacgccggaaggaagatcaattgttgtattagcaaaagaaaagtatagccttagagaacagaacttagaagcaaatcaggctaagtttattccattttcagcacaaactaaaatgagtggtgttaattttgctggagatgaaattcgtaaaggtgcttcggagaatatcaaacaatatgtcctgacaaaaaaaaataaatacagcgaagaatgccaaatagcagttaagagaattgctgaacagggagggacacctttagtagtatgcaagaatggtgttattcttggtgttatctacttgaaagatatcataaaacccggcgttaaggaaaaatttgctgatctaaggaagatgggcataaagacaatcatgattactggcgataatccagtaaccgctgctgccattgctgctgaagctggggttgatagttttctatctcaggctactccagaaagtaaaatgaaaaccattcgtgaatatcaaaataagggacatttagttgccatgactggcgatggaactaatgacgctcctgccttggctcaggccgacgttgctgtagctatgaacacgggtacacaggctgcaaaagaggctggtaatatggttgatctagattcttcaccaactaaattaattaaaattgtccaaattggtaaacaattattaatgactcgaggaagcttaaccactttttcaattgcaaacgacattgctaagtattttgctatcattccggctatgtttgtaggattatatcccaagttaaatgtgcttaacattatgcatttgtatagtccaacaagtgcaatcctgtcagcattgatttttaacgcactaattattgtcgccttaattcccctggcactcaagggagtacgttaccgagaagttccagctagtcagttactgcggcataatttgctagtttatgggcttggtgggatagttgttccattcattggaattaagttgatcgacttgatcattgcactcatactacagattctatgagaagggagaaagacaataatggtagttaagacattaggtaagtcaattttggcagtaattgtcataacgattatttgtggtatctataccttaattgttagtgcaattgggcaaaccttttttacctcacaagcaaatggcagtttagttagatctgatcaaacagtaaggggatcagcactaattgcacaaccattcacaagcaaaaaatacctgtggggtagacagatggatattactgttggcgatataactggacaaaaaaacaataaaaatattatgtactctgtggcctcacaaatgagccctaacgataaaagttatcaaaaggagattattgataaagaaaagacaataaaaagattgaatcctaatgccacttatcgacatgttcccattgacctagtaactaattcaggaagtggcttagatccggaaatatcaccaactgctgctaaatatcaggttaagagaattgctaaggctcggcatgtcagtgttcaaaaaattcaacgagtgattgaccaaaataccaaaactcgcactctgggaattcttggtgaacctcgggttaacgtgctagaaactaatctggccttggataaactatcaaaataacttttgaagcttagctgagataagtcgcgggttaagcccctaaatgattaccatatgtgataatcatttaggggttttgtgtcatatgtaatagagcctataaagatctttatttgaagattataaaagacaagactttatttttgggtaaatttagttagaacgatagtatacttaccaaggatattcttgtattctatttggagggataactagatgaatcaaaatgaacgtgcaagtaggtacttaaaagatgcaaatcttgaaacttcaggcagggggaaattaaagattttctttggttatgccgctggtgttggcaaaacttattctatgctagcagaagcacaggacttgaagcaggagggccaggatgtcattattggataccttgaggatcatggcagggcagatacacgcaatcttgctagggggttagaatcaatccctgtaaaaaaagaatcctataagggaatgtatcttcaagaattcaatctcgatggtgcactggaacgacatccacagacaattttagttgatgagttagcacatacaaatacgaaaaaaagtcgccatttgaaacgttatcaagacattcaggaattacttactgctggtatcaatgtttatacaacgctaaatgttcaacatctagaaagcctgcacgatataatttttgaacaattaaacgttgatattcaagaacgagtaccagattatatatttgatatggcaaatcaggtcaagttaattgatatcgaacccaatgatctgatcaatagacttaaaattggaaaaatatatgctagaaatcatataaggcaagcattagctaatttttttaaatctgaaaatcttactacgttaagagaacttgcattgaggaaaatgactttaagattggctaccaactcaaaggtaggtactgatcggctactagtctgtttatccggatctaagagtaatgaacgtgtcattcgttctgctgcacaaatggctcaagcttttaatagtgacttcattgcggtttatgttaagaacaatcagtttaataaatgggaggaaaacttaaataataacattagccttgcccatcaactaggtgcaaaggttattaaattgcagggtgagaacccagctctgcaaattacagagtatgccaaagaaagcagcgtaaccaaaattgtacttggggctagtccttataaaaaaatatggcaaacacgatctacacttgtgtatcaaataggatatctgttaccagaagttgatgagtatgtaattaatagtgctaaaactaatttgaatcaagtccaacatttaaatggtacatttttaacccattttaaaggttcacttagtaagtctggctctaagcgcatggctaaaaatatgctaatgatttcaagtattattttgggaagcacagtggttggagaactattaatatttgcacaagtaccattggtaaatgtcgttttggtttatatgttagggatcatgctctgcgcaattaacctaaaagatcaagtatatggattcttatcagcttttttagcagtaattagtttcaatttattttttaccaaaccctatttttctcttagtagtagtccagtttacttgttgacattttttttaatgctactagtttcaataatcagtaattattggacactaaaattgaagcaccaagttcaatataactctaaccgtgtctaccaaacagaggtgctgttggaaactattcgtaaattgcaacaagccaaattatcaaccgatattattgacacgactgttcaacaactacaaaaaatttatagtgctacaatggtcttttatgaatgccaggattctaagttactgcaacctaaaatttatctgttaaaccaaagccagagctctttttatgagttttccagtgataacgagaaagccattgcaacctgggcattcaagaatggtcaagaagctggattaactactaatactttaccacaagcaaagtgtttatatttacctatttttggaaattccccttcatcagttgttgcggttataggcttagcaataaattcaaaacgatctttggaaatatttgatcgtaatttaattatttcgatattggatgaatgtggtcaagccttatcaaggatgagaatcctaaatgaaaaaagaaaagctgaaattaaatcgcatcaggaaaaactcagggctaacttgctacgaggaatctcccatgatttacgaacaccgttaacaaatatttctggtagtgcagatatattgaaacgagaaggaaataagcttagtgatgttgagaagtatacattatatgaatcaatatttaatgactcttcatggttaattagtctagtggagaatctattggcaatgactcgtttagagagtagtcttcaagtacgtcattctccagagttaattgatgatattattcaagaatctttgcaacatcttagcccaggatttgaagatcataagattaccgttaacttgtctgatccattattaatggtcatggctgacgcacacttaattacccaagtcattattaatatagttaacaatgctattcaacacacaccggaaaaaaccaaaatttcgattagaatttttcaaaagaataccaatcaagtccaatttgagatttcaaataacggaccaaaattaactaatggtgatctggctcacctatttggactgttttacactggcaaacaaaagcaacccttaagggctcaaagagggcttggaattggcttatcattgtgtaaatctattattgaagcttatgatggtaatatttgggctaaaaatttaaataacggcgtatgtttttactttactttacctatttggagcaaaaaaaatgaaaaatagaattttgattgtcgaagatgatccagaagtagctcgattaatacaaatgacattaagatccgcagattataagtatggcatagctagaaatggcaataaaacgctccaatttattccaatttttcaaccagatgtacttttacttgatctaatgttacccgatatggatgggatggacattattaagcaaatacgagctgccaacaataatatacctattattgttatttcagcacgtgatgaggacgccgacaaagtgcaggctctagatttgggtgctgatgattatttaacaaaacccttttctattgatgaattactggctagaattcgtgtttccttgagaaggactaacataatatataacaacggaaaaaccaatattaataattattgtaatggagaattgactatcaactttgattcacaaacggtcaaagtaaaccaaaatgaaatccatttaacaccaatcgaatataaggttttgattattcttgctgaaaacacttcccgcgtgttgacacaccgctatctgttgaaagaggtctgggggacagaatcggttgaagatacatcttctcttcgagtgaccattgcaactttgcgaaaaaagattgaagttaatactcagaatcagtatattaaaacacacattggagtcggttatcagatggttcaactagatagttaagaatagaagacccataatttatggtttcaatcagtatatcgtaaattatgaacttctttaaagtgatttcattatgatgtatatggcatagttgcttttcttagtgtttaggcttactatttttcagtgccatatttcaagaaatgactttggaggcaagtaattatgaataagcaactagaacgtgtttcttttgcgggggcacttgttactttaggaattgtgtacggtgatattggcacttcaccattgtatgttatgaatgcattgattggtgacgccggtaaaatgggaaatatttctcccgattacgtgattggatcgatctcgttgattttttggacattaatgatcattacaacgttgaagtatgttgtcattgcaatgcaagccgataataagcgtgagggcggaatttttgccttataattttccatcttaaggcgtgcaatttcgagttctaatttgtctttgtcatccatgaaactcaccttccgtcctaatttattaccgccattataacagaatttttcaaaaatctcccacctatccactccaacaaaaaaagcccctctaatcttgtggattagaggggctttaacgtgctcttggttgcaacaacttccgcttaatctaaaataggcagtcatcccaaatttcgggataactacctatttggtattaatgctcaaaagttgatcagcttgaacgcacttctatttttaacgtgcttttcaaaccatacttctgcggctagctacgtcccgcaaacgatcgactccgtcgcccattcacgaaactaggctagtcctcaaagtataaccggcttgaacgcacttctatttttaacgtgcttttcaaaccatacttctgcggctagctacgtcccgcaaacgatcgactccgtcgctcattcacgaaactaggctagtcctcaaagtataaccggcttgaacgcacttctatttttaacgtgctttcaaaagcatcctattccggttagctacacatgcttacagcaatcattcgccctgttaggctaatcctcacaggataaccacttttgacgcacttctattttttgtgtttcttgttcagaatcttgtcgaacaagttgttgtcttgtgggttaagtgagtcaccacttgcgactgcaaatgcttttagcgcatcacgttgtttactgttgagggtctttggtgtcacgatgttaactgtaacgttttgatccccattacctgtcccgtggagcttaggcgcacccttaccacgtagacggaagacggtattcgtttgagtccccgctggcacttttagtttaacaggaccatggactgtgttgacttcaatttcatcccctagagcagcttggacaaagctaattgggacttctgaataaatttgtgcgccatcgcgcttgaattcagcacttggtgccacgcggaagacgatgaataaatcgccataagggccaccgtttgtgccggcttcaccttggccttgaagacgcatttgttgaccatcttcaacacctgctggcactttaaccttaacagtatgccgttcatcttcgtgacctgttccatgacatgtttcacacttgtctttaatttctttaccagtcccgccacagacatcacagacttcttgagccatcatgcggccgaaagctgtttgtcgttcaacttggacttgacctgcaccgtgacatttgtgacacgtttgggcgcttgttcctggtttagcaccagagccatgacacgtgtgacattctgattcacggttataagaaatcttggtttctttgccgaaaatggcttcatcgaacttcaaatccatccgatattgtaaatctgaaccttgacgaggagcgtttggttgttgccgagcaccgccgccaccgaagaatgaactaaagatatcttcgaaaccgccgaagccttcagcaccaccaaagccgccaccgaagccttggcctgcgccgccgccgaaaccaccgttcatgccagcatgaccgtattggtcataagctgcccgtttttgtgggtcacttaatgcttcatacgcttctgtgacttccttgaacttggcttctgcatctggggctttgttaatatctggatggtacttctttgaaagtttacgataggcctttttaatctcatcatctgaggcgtctttacttatccctaagacgtcatagtaatctcttttatcagccattgtgggcctccattcatatacttacgcgttaaatctatcttatcaaggatagcataattgactgattaaaaaaagccaaggccctagaccatactaggttttggctttttttaaaacgcattattatttgtcgtctttaacttcttcgaagtcgccgtcaacagtaccatcgtcagacttaccgtcagttgcattaccttcagcaccagcagcttgttgtgcttcttgcgcttgttgatataacttaactgttaattcttgaacgatttcactcaacgcatcgcgttttgtcttcatgtcttcaaagttgttttcttgttgtgctttgactaattcttctttagcatctttagccttttgtaattcttcgtcagaaactttaccttcaagttctttcaaagtcttatctgtttggaagattaattgatcaacatcgttcttcaaatcaacttcttctttacgtttgttgtcggcttcttcattttcttgagcttctttcatcatccgatcgatttcttcgtctgataaaccagagttactcttgatagtgattttttgttctttgtttgtgccaaggtctttagcagaaacattaacaatcccgttcttatcaatatcgaatttaacttcgatttgtggcacaccacgaggtgcagcaggaatatctgttaattggaaacggcctaaagtcttgttatcagcagccattggacgttcaccttgtaagacatggatgtctacggcaggttggttgtcggcagctgttgagaatgtttgggctttgcttgtaggaattgttgtgttccggtcgattaacttcgtgaagacaccgcccattgtttcaatccctaatgataatggtgtcacatcaagtaaaacaacgtctttaacgtcacctgagataacgccaccttgaacagcagcaccaagagcaacagcttcgtcagggttgattgagtgatcaggttccttgcctgtccagttcttaacagcttcttgaacagcaggaattcgtgttgaaccaccgtttaagatgactttgtcgatgtcgcctgattctagaccagcatctttcaaagcgttcataacaggtgcttttgtccggtcaactaagtctgatgttaacttatcgaattcagcacgtgataaagtcatttccaaatgtaaaggaccgttttcgccggctgagataaatggcaagctgatttgggtgcttgtcacaccagataaatcttttttagctttttcagcagcatcttttagacgttgcatagccatcttgtcttttgacaagtcgataccgttgtctgatttgaagttttcaactaaccagttcatgatggcttcatcaaagtcatccccacctaaatgtgtatcaccgtttgttgataatacttggaagacaccgtcgcctaattcaagaacagaaacgtcgaaagtcccaccaccaaggtcataaactaagactttttcgtctgtttctgtcttgtccaaaccgtaagctaatgctgaagctgttggttcgttgataatccgtttaacatctaagccggcaatcttaccagcatctttagtggcttggcgttgtgaatcattgaagtaagcaggtactgtgataacagcttctgtgacttcttcaccaagataatcttcagcgaatttcttgatgtattgtaagatcattgctgaaacttcttgtggtgtatatgatttgtcgccaacagttactttgtaacctgcttcgccgatgtgacgtttgattgatgcgattgtatcagggttagtgattgcttggcgttttgccacttcaccaacttggatttcgccgtttttaaatgacacaacagatggtgttgtccgtgcgccttctggatttgtgataatttttggttgtccgccttctaatacggcaacagctgagttggttgtccctaagtcaataccgattactttactcataaaaaataccctctttttttagatttttagtttaatttattgtgcaacaacgaccattgctggtcttaagacgcggtccttcaagtagtagcctttttggaagacttgtacaacagtatccgctttttgatcaccatcaacagcgaccgtttgcacggcctgatgaatggtcggatcaaaggcttgtccttgcgcctcaatttccttaacgccatgatcttctaaagcatgtttcatatgatcgtatgtcatttgaacaccctttttaagactctcagcactatcatcagttgcttcagttgccaacgcacgttctagattatccaaaacgggtaagacatcttttgcaagtgattgcccatcatattttaacaagctagcttgttctttttgatgacgggtttgaatgtttttaatttcagcttgtgaccgtaagaaactatcttctaaatcatcatatttcttttggagttcagcaagttgagccgctaaatctggcttagctgcatcttcgtcaggtgcagcatcttcgatcacttcatctgcttctaattcaggttcaaatggcgtttcttctttaggtgtttctgtttctggcatttctgctgctggcttttcttgtttctcagccttttcttgcttggtcaaacaaacacgctccttttaagattgatcatcatcgaaattcgcataataatcaattaatttcttcgctaactcttcacggaataaatcgagtaacccaatcatccgcgaatagggcatgctagtggggcccagtagtgcaatgactccctgtccgtgttcaccaacgtcataattaacagtcattagactataatgtttcaacagatcgttggccatctcggtgcccaggcgaacctgaacttggctattggcgcctccaggggacaaatctagcaacttggctaaatcatctgaacgattaatcatgttatacaacgacttcagctgggtgacatcggagaactctgaaaaattcaacaagttcatctgaccgccaacaaataagcgctcttgactcgcctttttcaaaacatcgtcgaagatgtctaaaaagccggtcggagaagccatgtactgggctaatagcgccggtacatccgtctttaacttctgactaaccacggttaacggtaagccaattaggtgatcattaatgattcgaatggctttttcgagttcatcacccgaaatcgcttgtggaatggtaaatacctgattatcaactgtccctgcactcgtcacgataatcgccatcacttggtgattactcaacggtactagacgaaaaccagttaaccgaatctcagccacttccggtcctaacgcgattgctgtatagctcgttaggttcgataagatattagccgattgtgagacgatttcatcaatcttatgatagtgctgtccaaatgattgttggaccgttgccacatcaaccggattgagggttgctggttgcatgagatggtctagatagtagcgatagccttgcatcgacggtacccgtccagatgacgaatgcgtcttctcaattaaaccgacactttccaaatcagccatatcattacgaattgttgcagaactaacgtgtaccggcaattctgccattaacttcttagaacccactggctgaccactctctgtaaaaagacgaataatttctttcaaaatcattaattgcctttcggtcagcatgtcatcacctctttttagcacttgaatatcatgagtgctaattacaattattaatatagcaagaacgtcaaataaagtcaagaaacgtaccggcttttttacggatttactgaaaatcggtccttagacggagggccttactggaccaaaggacaaaataaaaaacgagccgcttcttagatggaagagactcgctttatgaagtggaatatttataacgtgcttttcaaaccatattcctgtgcctagcgacacaaggcgaatgctcagaatatcccccggtttgaacgcactcaataactatctagcagaaactcttggaagacttcattgcctaagaacttacctgattcagttagtcttaaccaatcgccttcttgtttgaggtagccctttacaatttgggtggcaactgtttcgccgtaaacattttgtaatggataattgaatttatcttgaaaatgactgatggatacgccttgcatcgtccgtaacccgaggaagagttcttcctccatttgttcggtcagtggcagaacatggcgttcaatgactggcaccttattttcttttaagggttctaagtattgttggattgggccgaagttatggtaacgatccttacctaaatagccgtaagcaccggcaccaaagccaaaatacttttcattgcgccagtaagttagattatgcgcagattgaaagcctggcttggcaaaattactgatttcatattgatctaagccagcccgcttgaaactatcaatcgcggcttgatacatatgtgcttcaacatcttgcgatggtaaatgcaacttgccttggcgcatcaagttatagaagattgttttgcgttcgagaatcaatgagtacgtcgaataatgcggtaagtcgagttcaattgccttattcaaactatccatgaaatccgcttcactttgttgtggtaagcggaaaatcaaatcgatactcatattttcgaagccgaccttgcgcgcgttatcgattgcccgataaacatccgcacttcggtgaatccgcccgatctgttttaaaatctgatcattaaacgactgcacgccaatacttaaccggttgacgccgttgtccttcagaacttgcaatttttcagtatcttgtaagtcattaggattggcttcaaacgtaaactcaccaccctcataaggtaagtattgatgaatcccatcggttaaacgttggagttgtgctggtgataaagtagttggtgtccccccaccgacatagatcgtatcaattggttcgtctgggtattctgccatcactaattgaaactcgcgaatcaacatatcgacataatcatcgaccggttgaccttcaatgaaaaccttattgaaatcgcagtagtaacaaatatgctcgcaaaatgggatgtgaatataagcgcctgccattaatgttgtgcctctaatttctcaaaataagttcgggtatcggcttcgtcttggtggagttggtcaatcaaggcttccgcggagtcaaacttcacttcgccgcgtaagtagtgataccaatccactttcacttgttcaccgtaaatatcgccattgaaatctaataagttaatctccaccgttaccgggttattgctgtggaacgtcacattccgaccaattgaagccatgccaatataccattgaccgcgcactaaaaagcggaccgcataaatcccaattcctggtaatcgttctggtcgttgcgattcgatgttagcagttggaaaccctaattctcgcccgcgtgcttcaccatgcactacttcaccggtcgtttggtaaacataaccgagtaattcattagcttccgcaatcttaccagcatctaaatcctctcgtactaatgtcgagccgattttgacaccattatggtcatgttctgcaactgtcacaatggcaaagcgccctttggcatagtctgacaatgtcgtcatattcgcaatctcttttttaccataagtgtaatcaaagccagccaccactgtatccgcatgtaaagcgactaagtattgatcgacaaatgtttgtggggctagttgtgcaaatgcttcattaaagtgcacgatgtagaaaacatcaacgcctaactccgccatcaattcttgcttgcgctcaaccgttgataaataacggaatgactcccgatcggcattgcgataaacaatggcaggatggatatcaaacgtcatcacagctaatagtaaacctttttgaactgcaatttgttttgctttccgaattacagcttgatggcctcgatgtacgccatcaaaaaagccaagcgccaagaccacttggtcagctggcacttgttcttttgaatatggatgaattaattcaatgacacgcatatttttcacctagttttttttaatgagtcccttgattttgtaaatacattttataagggcgataaagatgttgcgctgctttttcaacttgatagagcgccttgatatgcccttgataggtcaacgccacaatctcatcggtttgttctggcaatgtcaagaacacaccgtttaaaagcttggcccattgatcgtcgtctaaagcaatcttcttgtaatcttcaaatacatggtcaattggcaataaaacgtctgccagttcgcccgcttcagctttttgcgccaattgttccaacgtgatacagttaccaatttgaatgccgccactcttaagacgtgtcaaatcggacatcactgcgggtaaaccgagtttacgaccgaaatcaacagctaatgtgcggatataagtcccctttgagcaaccgacaatgaaccggaatgtttggcgcccagattctgcgtcaaattgtggttcaccatccaaatcaaactgcgtaatcgtgattgaacgttgtggccgttcgactggatcaccagtgcgcgcatagtcgtataaacgccgcccattgactttcaccgctgaaaacatggggggaatctgaattgaatcgcccagaaaactagcgagggtctctttgattctctcagttgaaaaaggttctgttaagcgcgcctcttcaacgacttcaccatctaagtcttcagtcgttgttgataagccaagggtgatttcacccgtgtagactttaccagaatgcaccaattgatcaacaaccttcgttgcttgaccgatacagattggtaacaccccatcgacgttgggatccaacgtgccagaatggcccactttcttcatgtgtaaaatgcggcgcactttaaacacacaatcgttactcgtcatgccgcgttctttatataagggtacaatgccgtccataagtaatctcctttaagtattaactaaactattatagcatagagtgtgaagtcgaacgggattagctttatgatgctgctcaatttattatcaaagcacaaaaaaagatgggacaaaagaaactcttgcccatcctcgctcaatgttgttttatttgaggactccttcatctttaaataagtattcagcattcttaagcgaccaatcaacatttcttttttgtttctcttactcatgccagtgacattaccaccgtgtcgaacatagtccattaaagtagcagaagtcgccgtaattttaaaatgattctttttagcaacaagaaacagccactgatcatgcatttcgattttttctggaaaaggcaacgcggcatctaataatcgtctcgaaatagccatcatggcaccagtataaccatttttaattaaattactaaatacactttggtcaacttggttatggttgtagtgattccatgactgatcaacaacctctccattctttccaataacagttgcatcatggacaattaaatcagcgtgcccatttacataagcatcttgaataatttccactttatcatcatgccattcatcgtcttggtcagaaagaaaaacaagattgcctgtcgcaagtcctagtgctttctcaaacgatttaattggtcccatattctgatcgtttcttttcagaattgtttgcccgttaaaattgaccaacaactccctcagtaaccccattgtatcatccgatgaacaatcatcgataatcacaatttcatcttgcgcggttaattgcttgataattgattttatctgtttgggtaaggttttgacaccattataagttgccatgcaaacagaaatattagtcactctgtctcaccaaatctttcatttaaaacggtaagaatgcatcattcttacccattttttcatttttaaaatccttgtaggctgtattaactagtttgacggcagcaaatctagaatattggccttttttctttaaaaaggcacccattgcatatctgaaatgttcataccgtaattgcttagctagaatttgttggttctcacaatgtaacttcatagtttgccaacgattacgataaccatagtagtccttccagccaattggacgattaacaccacttgctccgacactattattatctgttagatgataaatcttagcttggatattattgatcatttctgtttccttgcgaatacgaagtgagtattcaatgtcatcataccaaataaagaaattcttttccggtaagccaatcttctttagcacatcttttctcaaaaaaactcctacaaaagtagcaatatcaactggaaaattaccttcatagctcgttaagtcaattttagataattgtagccggtccaaatcatcaattttaacacgatgttcggttccaatttcaccatcttcgataacagttcctgtaaaacaaccgatatcggcatgtttttcactaagttcagccattttcttcatataatcttgatcatagactgcatcatcgtcagcgatactaatccaatcaatttcaggcaactcaagagttgccgccaaggccatattaaagccacctgcgccacccaaattatcttctgaatgaatgactttaatttgtgcgttatcgcgcgcttttgctttcaaaaaatctagcgtatcatcagttgattgattatcaacaaccactattttttcaactggcgcggactgctctaataaactatcaatcgccttttctaatttatccctacgattatgggtcacaataactgctgcaactttcaaattcttatccacgctttcttttaaacaataaataatttaataaatagaaatttctctgcttaatcagtaatcctaatagtttctgtttcattggcatattgactaatctcgcattttttatttgcttactaacaacaggcgtttctagataagtcttaaactcattttttctttcctgatatgacttagagttgcttagattacaaaaatctgcaaacaagagttcaatcgagagtctcaacatataagaatccaaaaataatgcgttatctgattgttgtaaccaatctactaaatcatcgttcagatcattcgaaactgtaatgaaactttccttaaccccttgtcggtaactattactaattgaattatcatgatcaattctatagtgatacagtatcgaatcaacaatgttaattctagggttcttcaagaaaacctcaatgctaaataacgcatcttctctcttaataattcctgctgggtaaaataattgattagcttctaaaaaagactttcgaaacattttggcccatggtgttccaagaaaatatccataaatgccattataataagcgccatccgaaagcgttgcacgaattaaatcatccattgataccggtgtagcgggaaatagcttatctttaggaaaactattttcaactttaccgtcttgatatactcgatcaaaaccaaaaaagataacatctgcgttagtacttgctttttctaacaatatttcttcaaatttctctgctaataagtcatccggatcaacaaaaagcagccaagttcccttagcagctttaatccccgtatttctggcaaccgatacgccctgattagcttgttcaatcaacttaaaacgcttgtcttcttctgaaaagcgtctacaaattgctactaaatcatctctagcgccatcacttattagtaagaattcaaatgaagttgtcttcgccaactttaagcgttccaacccagcctctaaaattgaattttcagtaccatagattggtaggatgaaactaattgtctccatcaaaatcctcctaaattttcaagtaactcttattagaataatctgcgtatgagtcgattagtgcaaatataattggatatgctagttgtaagctcaaaccagttgcttgaatcatatttgaataaatagttaatgcaaatattgtatttaagacggataacccgacaatgaaaaatcttgaattcaacttatataagaagtacagatacacgtatgcacccgcaaagataataatgacgtacatagtaacaccaatccaccccaataaacggtaaggactacttaatgctgtcccgacattcaattctggtgtaatttgttgaattttgacctctttataatctgaattagcaagtgctctcttaccaatgaaattgggcagtaactcaccaaaaaacatactatttacttttgaaactgttattttttcagtagtcttgctataatctacatttttttgaaagttagccacgggtgatgaagcgtaaatataaccccaaaagaactccttaggaatcttactacttttaaatttttcagttgcaccaccgatttgcataattgacgctgaatcaaaagctgatcgaccattttgatatgacgtgttcactcgtgcatttcccataacaccaaataaaaacagacccaccataccgaaaatcgctaaaccaattatatgtctaactttaattttcttccagattgctagaataaaaatggtaaaacagtttatcatcaccatcatgaacattccgcgattaacttctaaaacatacggaatacaacttagaacacaaagtagtatatattgatttctcaacttcccagttgaagagaggattagatgccacaagtaggttgttaaaaaagctgtcagagtgagtaaaaaaacgtgaactgtcggaattccaaattctgtataaccggaatccttaccttggagcataaactgtaatggaaaaccatgattgtaggctccttcagctaatgtgcctattaaaacaataaccactaaccaaacaacatttgttgtactcttaattttcttaaaagatatcacattacttttatagataaagtatcctagtacgccggctaacaagaacattacaataaaaaagaaaataacatcactcgaaaaacttggataaatactggaccagccaaaaaagaaacttagaataactgctgaaaaagccagaatgaacataaagaacggattaaccaaatcgttccctcctaattctttctacgcataacaataaaatgaatagcactgaggatgaagcccaatactgcaccatagatgatgcccataatagaatttgttttcttattactaaagcctattgttgcagttgtatcttttgaagcctggtcaatcacaactaacttactcttctcgtcatcatacttgatcacttcttttttcaaaagctctgtcgcatacttagcacctttaatactcttggcttgcgtagcgccagtatatttcacagctatgactttagatccgttgctactatcaattaacaaattatcgcttgaataatctctaacctctttagtcatagcctttttaaagctttgtgtcttacttaaactattaattgattgccaaaaacgctcaacatcgttatcaaaaataccgttaccttttttgtcttcgacataccccttgttaacatatactttagctgttgtttcgtaactaattgttgatttggcagtcatgatcccaacagcgccaccaatgataattgttacaaaaatgacccaccaatattttttaaaaacaacacccacagatttaaatcccacaccattttccatttaacttaactccgtttcttagtaatttaaaataatctattttattgtagcataaacagtgtctaaccactattcgttacctgtaaatctaaggaattctttaaagatttctagactttataaaatcttcaattattagcttgagattacaatggaaagcctctttaaacgaaactgcaaccattttttgaaacaaataaataaaagtaaaattaggtaactacgtgcgccaagtataaactagcacgtcgcttttccagcctaaccaccactcatacctaagtttaaaatcctaatgcattctagcttagtttcataggggtatcaattattagccaaattaaaaacacttccgatttaaattttatatttatcgaaagtgcctattatatatctgtatccaattttaacttcagtttctcacggataacctgttattgtctacaaactcattaaactgtatataaaataacacagaaagctaggccaccaattccaattaaaatgtgcgttaaaatttgatattctttctttttctcaatttgatcatataaatagaagcaaccaaaaataagtgcctcatataaaaataggaatgttcgttctcctgatgcccaaattgttggtgaaaaccccatcatgattctcgaaataagtccgagtaacatagctaccataactaaccacattcgtttagagtttcccgaagaaaatatccccaataaaacaatgcagcttactacaatcagaagtaaatctggcaagatagattgtaaattggccaaagagatatctgtcccataaatagtaacagcaccccccattttctttaatcctggataaatttttccaatcaaagtatctttaaaccaaaaaatcacgctgaacagtaccggaatatagaaaactgtacgcggtattttatatctccccttctgatttatataaaacgcaaaaagtaaaatcacaagtattgtcgcaagcacatcaaatgaaaaaaagaagtgacctaatgtactagaaatacctaactcaatttttttaaagggtgacaaagttggaaataatggtaaccaatgaatttctttgacttttctaacgctatttcctggtgctaaaacaatcataatcaaagacaatacagtaactacgaattgaaatgccaatctccccagtgcctttttatttcctcttgttacgtacaataacaatgaattacccaataataggataattaccatttgttcttgattaacagcatagattaaggctaagaaagcaacaactgaaattatttttttatgtttaatgtctattcctaaatattgagctaaggaaggtagcatcgctaataaaccggcagctaaaacccataggtaattggttgtggttgccatccaccctgtctcgtagaacatattgaaaggtaataagaagaacatcccaaaactaatcaatagacgactagcattctcatcatcatcagttcctttaagaagcaatagatacgggatatagataacagtaaacattgccaatgtgtttaataatcgccacagaattggtaagtgcgttaatgttgataataccgattcaattactagtcgagaagaccatcccgtatatcgactatgtaaaaattgtagatagtgttttcctagaacaaattgagcaaacgccttatcatcgccaccattgggtgtgatcccatttcctgttaaattaatcgataaatttagcgctattaataaaataacaattaaaataatcgcccatatttccttttttttagttattttctccatgtgaaatcctccaacttttttgacctcaataccatgattcctaaactcatagtatccatcttattattattgcatgacactagtcagtgttgtacctatttccgtttaaaatccaaaatcaacctcaacataacagccatatttgctatgcccgcaatgatcattactaaccactcatttttcaatggttttgcaacaacacaaagcttagccttttttttatttactaattcgttagaactaattgcgattgttccgtatgtttggttatgaatccattttactgtctgtccatcaattgtcacccgatagttaaatctattataggctgctactggcgtcactaaatatttattcataactacgtgtttgatcctcatatgatatgttgcactattaaaggatggcactgaatttccaaacataatcggtcctttaatatcactatacgcagctttaaccgcatagtccacaccgctttttggtccagaaaaagccggaaaataatcaatagtatgcagctgattattatacccactttctaaaatattagtcggcactatctcctgataaaaattctgagttctataaattgtcatcataccattaattagaaagattattattggaacacttattagccatttcgcccacaacgccttgactttaatcatcatacgcataaccggtaccactaagaatatagccgctaacattaataatctacccaaaaattgaattactttaataggctcaaatattttaaggtgttctgtaaaatcccaattcacaaaatcgaatccaccaatcactagtaagagtccgataattcctacaaatgcataataaccgtcgttatcttttcttcttacaattagataaataattgcaataaaggccaatattagaaaaagggtccctatattccatgttcttgcatttaaatccgtaagcgctaatggatgaagtgtatgctttaagtccacaatatatgtttgcggaaagatagaagattcatttagaggtgccgaaatattaggtgctaagtatcgattatgcatacttaacactaaaaaattataaatagtaactgcagacatcgggattgtcaaagccgctgcaatacaaatataccgagcttcttcccaattaaacttctgcattaataatctaactatttcagccaatattaatactacaatcaaaaacaacaaggatagaatatgtgaattagcaattagcgaaacacctaacgcaagcaaaagtattccaactttttgacgtttccatatcttaacaattccccacgccaccaatggaaacattgtatagccaagtagttctcctaaagcaaatctcttatatgaaagtactaggtgataattattaaataaatataaaactgcaattgaagacttgatccacaagttattggtgaattccccgataaatccaaaaatatttgcagaagcacaaatgttaaataacaaagcgaatataaatacttttaatctaagttttatcggtaataatagcggccaaataaaaagatacaaggaaaagaaaggatacattgaattgactcccaatccctgtgccgaaaattctaaaaaattaacttctacaggcagctgatacgcctttaatgatcccagtaaacttcttattctagcaaaatgaaacgtccaatcctcaccctcactacctctaactactcctctagtaagaaaaaaaggaagtacaaatagtaaaaaagtataaccaatatattgaaatagatactcggttacaaaacctagcatattcttggcatttattagattaatgctagtttgttatttcatcaagctaattgcatagatctcattaatggctataaactcgccaccaatcatcaatttatcctggtaatagccttctattttcccctcaataaaaggggccacataaccattttgatcttgcaggctgcgttcgactctaacaacctgactcttttccaaagcctgacttaaacagctttcaatctcgttaagcgccatttgttcactatgccggcgatttaatttaatttcgtcttcacgatctaccttattcaaactagccgtatgatcactcaagtaaaatccttgccacttcatcatgcctcggtcttgatattggtttaaaaactgtgttaccaggtttgggtcaaattcttgtttattcataggaattccctccagcgtggccaccaactaagccagcacgttgtacagcggttgcgccaacagatttacttgataacttaatcagtgatgtgaaaccatatttttttcgaatgtcatcaaccgtacgatcaagattgcgattttttaaagttttgtactttgtatcaaacaaattcaattgcacaacattatcgtcaactagaccagcacagctaattgagatgttccgaacggcttcgccttgccacttatcacgaaaaagcgttatagcataagctgctagaagtccgttatcattggtggcattaattttcatagagtggccaaaaccacgtttcctggtttcctcctttgctctgaaagaataaccgattcctaagctaataactgtagccgctttatgatgtgaccgaattcttgtagccacctgttcggcgatttcacgtaagacaatctctatttcttcttgcttggtataatcgcgtggtagcacctgactgtttccatacgatttagccttaggtacgtacttatcacgaattaacgcccgatcgataccccaactaaacgcatataattgcccgccaataaccccaaatttctgttttaaaagaaacgggttatagtgggccaagtcatacattgaattgatacctaacttatttaatttctcggctgtcttatggccaattgaccaaagatcatcaagttgtgtcactggccacagtttgtcctgaacgtcttcatagtgccattcaccaattagactgtgggtacgtttagcttccatatcaagcgcaaacttagctagtagcggattatcaccgataccaactgttaaatagatgcccagctctttcttaacctttagctggatctttcgagccacctctcgtgggctgtctccaaaaagtttccagctattcgtcatatcaattaaagactcatcaatcgaatagggttgaatatcctcttctgccgcaaaactcttaaaaatctcatgaatggccagattatacttgatataaaggttcatacgtggtggcacaacaatgatcctattatctttaggtacgtccctggtgcgcatgacattactaattccaaagagtttcttggccattggtgaagcagccagtactaagccaccatttgtgttttcagccgtagacatgacgacaagtattgaccttaaaggattcagaccaagttcgactgactcacaactcgcgtaaaacgactttgaatcgatcataaacacgacgcggcgcgactctttagcataatcgtacattgggcataccttctcttaaagcgttagcctgataatctaaagacttctggacgtggccaaattcaatcatggtcatgttaggaatatgcttcaaacagattttaacaagttgatcgcgatcataaaaatagttgcaactatctattaagattgtcgactcatttgctagttcgtgtcgcagctgtaaactaccgtcataatgcagtacaaaatatttgtctgagttttctaaccaaattggtccttcgaaaatcattgctgtagcccccttcaaatgacattatacaaacatacgttcgctgggtcaactgaattattacttattaattagtttagaatgtacaattctgttgtttttatctctgttgcgtattacaattagaggttcatattttctaaaaaaattgaggttgtcttaatgttaaacaaactgcaaaaactttacacgtcaagcctggcacgtatcgatccaaaattatctaatatcattggtaaaatgaagctgttatggatgaaacaaataaattatattatacgtattctccgcttttttaaaagaatagcattatctgctggttctctcacagtaaccacaatatttttgttactgttttacatcatagttcagctgtgggggtttaccaacgagaagtatagttcttggcttgatggtttatgggatatgaaagctacttttatcacaacaattgggattggacttgtcagtctcagtgtaaacgaacaaaataattggcgagcaaaactaaaggttcaatatggttttagaatggcgtttacatcggtagaacaagtaatgtccgatataaatagaacttttttggttgatcaacaaattatcaacgatttaaataaggaatatgcgagaatacaaaataaagaagctgttcaaaagaatattgacaagtcagaacttgatttaaagcttaaaatattactcgaaatctcagaacacttattagaaaagataaatttcacggaattagcagttgatcagaaaaatattcaattggagctttcctacttaaatagcgagattagagaatttatttctaaaccaaccgcaactgatacaaattatttatatatgtttaataaactaaatttcagtatccatacaattgcaaatagattaagttctccttggcgatgggacaaagatagaaagcaaaagtattgcaaaataattgaaaagtataagataaataaggagtaattgtatacaaataaaatataaaaaccaaacttaattcttagtttggttttttaagtatcaaaaactgaacagtacatgacacctactttattaatatttttttactcaaaaagattagaacctaattcaactagtttatttctccatctcttgatttaacgaaattgggactgagtagctatattattgtatatctattgatcacctttttagaggttagtcttcgaatatttaacatgatttacgaccgtttggcaattcttatggtaaccactcaaattatagacatttgtaaaccacaaattaagaagtaaattctgagcggcatttccggttacacctttattacagtaagtcacagtcaaaatatttctatcaagttcgttgacgcgtttacgaatatcacctaatggcgtatttatagctgaatttatatgttgttgatcatattattttttgcacaaacgtcaataacttgtatttttttaccatcctgaagtaactgatatagcttagatatagtgaaatatatattcatctacctctgcgatctcaaaaaatggtctttaaggatattaacagaatcattacattagaagcttttaatatttctaaagtaattctttttaaaattaagcagcaaattgaattggagtcgctacaagaaaaatagatatacaaaaagcgagtttaacgccgattatcggtattaaacccgctttaactttgatgtactaggcagtagttagttacaagcggagcctcagttacccttaaaatgacaagttgaagatggccgccttgttaagaaacaataacgagcaatgtgtaaacggtacctttccctttttgaacctttaaattgcactttatatacatctacttttttaaggcttatgctaaagttgatatttaattaaaattaatcttgattaattaaaaataaatggtatattgattaaaaagagctgagaaagcatgaatagtattttaaatttacaagcgttaccctcaaaaggggaagtttctccagctaagcaggatacatcaagtggtagtagtagcagtagtagtatcgtaaataacagtacttttagtattttttgtaaaaactaacagaattatagaactaggtatatcctaataaatcggatacctagttttttaatatcaataagttctaaaagttaattcaaaggttgattcctccactataacgtaattttagtagttaactggtcaactaattattaaacaaaaagtttataaagttatatttgatgcacttaaaattgttaaataagaaatctgtcaagagttacgccgtattaatctacacaattctaaatcagctcagctttatactgaaaaaaatattttcgtaggcaatattcaatttcaatagtccagttaaacacattgctcctatcttgttttattaattatggcacaactgttcagaaatttatgtaccaaatactaggataggagcaatacttgatagtgatcttagactttttagcaaaaataattagtttatatttagttaagccttttctaaaatcatttaaaaattgagaattggtaggtgtttatatgaagaaatttttttcactgtacaagcctttattaattgatacacttagtaacaagttcgtttttatttttaatatagtgcttccaataggaatgtttataatttctaatagttatcttttacttagaacaactaatttaagtaagactcaaattatttcaggggtgagttattatttttcttatatagtatttataagtgttttaaatttaatgatactaccgcttattgtttatagagagtcggggtactataaatttttatattttttaacaaaatctaaatggacactaattataagcaatttatttgttcaattcactttcataatactcgaactacttatctttaatattgtggtaatgattattacgcatactttgttatggtcgctgttgctagaaacagagttagccgcattgttattaacggttcccgttgtattaggatcctgtgtattactgaattttagaatcagaattgagagtgcaagtattgttatatcattttttatttttctttctttttctatagcaacattatcgagtaagaattttattttcgacagccttttattgttaaaccctattaagtatttgtctattggatttaacactattagtcaacttcctagtgggatttcaatcaatacactactagaattactatttgtaactataatatatttagtcattggcattacatctgtagcaaaatataatatacgaccattaatagatcgggggtagagaaattacaatggaaattaacaatcttgatttttcataccagcaagaaccaatatttaaagatttaagtgttaacttttctgacaaaactattaatgctattatcggtgttaatggtgcagggaagtctacattattagatataattgctgggctctatacaaaaactacaaataattatttatctcattttcctgattcttgtaatattatgtatcaattgcaacatactactttcttcccaactctaactgtagaacagacactagacttatttagaaagattgataaacaagatgaccctgtaaataatcggataatgaaggaagtatatgaaaaagtaataggtccgttaatgcacataaaaatgggtatgttatcaggcggggaaagacagatggttataacgtacggtatttgtctacttaatagggaattatacctattcgatgaaccgctgagtggtgttgatgtacgaaattctgagttaataatgaaattaattacatcactcaatacagatagaaataaaaaggtgatactgacactacatcaattggaatatttaaaagatacgacagtaaatattgtatttatagatcaacaaaggtgtatatttgaaggttcatttaaagaaatattaaataatagtcaaactactgatatcgatgcagcttttaaacgactcacaaagtagagtgtaaaattcatccacttcgttgctcacaaaaaattagtcccctctgcttcagccatatttggttaattagtaatgtaaaagaatagataacactaggcaatagtgttatccattcttttacttctttataaagggttcacgttaatactattgcgccatttacaaattttagaaccaaaattcggaaatggaagaagttagccctttaatcacaccagactagttaatcatggaaaaattcatttaatcactacgctagtctcaaaaactgtacagtttttgagacttatttaaaagtgtgctatactgggatttgtagagtctcatattcttagtctcagaaaagagtgatatttttggttaaaatttatggttatgcccgggtttcaacttcaagtcaaaatttagaagaacaagttgctcaacttgtcgacgctggtgttaatcctcaaaatatttattctgaaaaatttacaggcacaacaactcaccgacctatttttgatctactattaaatacaatctcgaatggtgatactttggttattacaaagcttgatcgctttgccagaaacacacgcgaagccttaaatagtattgaaccactgctagaacaaaatattagtattaaagttctcaatctagggactattgaaaatacaccaatgggtaaaatgattgttcgaacccttctatcagtcgctgaaatggaacgcgatatgattgtagaacgtactcaagcaggaaaagagtattcaaaaaaacacaatctaaactatagagagggccgtccaagacgtaggattggcccccatgaacaagctatctatgagtattataaaaaccattcaatcaaagaaacaattgcagcctttaatacctcaaaagctactctttttagaataattcaccaaatccaaatagaaaatctctctacatcagaaaggtagttacagaatcaacatgaagctatttagaaaaaaatataagccctttcccacccctgaaaacacacccggctatactaataaaaaagtattcgacaatttcataactgaagcttccaaaattttgcaagataccaggcgcagccaaaccgttgataaaacatctatattcgttttactaaaacatttaactgatttagtcacattagagacttcattcactgcttatgatcacagtagtaccgaattttcagactatcttcttcagatttttgaggttaggaacgaacacaatgctaaaaaattatttgaagaaatataccttaatttagagttaaggtagattgcaaatttaatccgaatttttggacaaatttgtcagcataacctgatacggtgtttgccattcgagtattttaagcggtcgctggttaatttggagtaacgtcgtcgttaaatcttgagcaccgtatcaggttatgctgacaaattcgtccaaaaattcggattaaatttgcaatctaccttatttataaatttaatggattttaaagcgggctaataattatttagcccgcttttttgcgtcttatcgctttcttagcttatggattacttattaattgccaaacaaaatattgtacattgaccgattctattcgttaaagtttatatataaataatgtccattattacattatttatacttacttataattcgatcgtcccccttagactgatgctgggatggcaattatcgatactaaagtatttttatgaggagtgtatgatgcaaagattaaagtatttttacaggcgacatgccttaacagtaaccctattattttttggactattaagtattgcgatggttgcaatcgtctatttacagcccaataaaatcctgtctggttctgactatcatttccacatgaaccgcattgagaatttggcactttcgattaaacagggagagtggtttccgagaattagttactttttcatcggcggaatgggctatgcggcaggtcttttttacccagatgcttttctctacttaccagctattctgagagtagtaggactatcaatcaaagaaagttttattgtatttgcaattgcgattaattttagtacgtttttaatcacatatatttcaggaaagttagcggattttaataagaagcaagcattaatattctctttgatgtacggtcttagtatttatcgttttgcagatttagttaatcggcaagccattggtgaagtgatcgcgctcacctttttcccattaatgattgtgatgctaacgcggttaaaaaaaggtgagcaccggtattggtatctgttatcaatagggatggcaactattggttatagtcatatgatttctgttgaaatgatgggcattgtcatcattatttataccttattaaatctcaagggattctaccaaaataaaagtttaaagtatctcattgctgctggcttattagcaatcggtttattagggcgttatttcttagcggttggaaaacaaatggcaaccacgacttttcaagtaaccgcacaacccctagcatttttatctgaccgcacattaccctttaaagacattgttgttaattcattaacgaatgctgtttttcatgcgaatactgtgaatgtcggtatcacgattctactcggattaggcatcgcgtgtggtctattttactattccaaaaacgaccgtgatttaattgggattgcgttggggctattcatagctgcgacgccgattatgccttggcatttgttggatcatacaattatcaatacgattcagttcccgtggcgtttttttgccattattacggcaattgtgagttatttagttgctaaggatgaatgtcatttattaaagaataagtactacttttatctgctaattctgttgttgggcgcaggaaatgtcatctactctacgaatagtattcaaagccaaagttggcgctttagaacgaatgctgcctataacacgcccaacccttattacattggggccggacatgagtatttacctgctcaaaccgactaccagaaaattttgcgacataaaagacaggtcgttaagtatcagccgcataaaataaaaattacaaatgtacggcatacatggggccgttatcagtttgatttcaggacactgacggatcaaaaagcagttgttgaagtcccctttatttattacaaagggtacgttgccgaactcaaccatcatcagcgattaccaatgcagatgaataaacgaactgggttaacacaagttgcgttgaagggaactggtagaatcaccgtttattatcgaacaactacgattcagagaatagggacggtgattagtttgcttaactttgggatgctgatcataatcattcataaagaaaaaaggcgagctactaaatagcgcttattcacggtactagactaatcctcgaaatataatcgcaagatgacgcactctgtttttaatgttaaaatggatgcgtttagtattggaggattgtcggatgaagaacgagatgaaatattatgaaatctcgcgtgatgagtggcgggtttttcatggccgcggtgacgcgtatactggcatcacggacacggagctggaacagattcggggattgaatgatcggatttcacttgcggatgtgagtgatatttatttgccattacggcatctgatacagatgcactatgaacagtaccagatgcgccaggccgaaaaatctgaatttctagagattaagccacataggacaccatttatcattggcatcgctgggagcgtcgcggtcggcaagagtacgacggcgcgcttgttgcaactccttctcagccgggcctacccggataagaaggttcaaatgattacgactgatgggttcttatatccgacagccacgctgaaacaaaaaggaattcttgataaaaaaggctttcccgaaagttatgatatgccgcatctaattcaatttatgaatgcggtcaaaaataatgttggaccagtcaaagcaccgaaatattcacatcagatttacgacattgtgcccgacgagttcgacgtgattgacgatccagatattttaattgttgaaggaattaacgtactacagttgccatcaactgagcagatttacgtcagtgacttcttcgacttttcaatttatgtcgatgcgcaagccgacttaatcaagaagtggttccttgaacgtttcgatctattactcgatttagccaaagatgatccgaccaactactattatccatacgccatcagtgaccgacaaagtgcattcaagatggcgcggcgggtatggcgtgacattaatttacaaaatttaaacgaatatatcttaccaacgcgtaatcgtgccgatgtcattttgcataaaacgaaacatcacgtgattgataaggtattcctacgtaaatattaataatagaatgagttttttcacaggaaggccgtcaatccattgacgttttcattattaatcagtaaaatagatacattatagtttgacttagtgttatgaatctagcaatttggtgttacttgttcacaccaaattgctttttaaaaagaggagtgagttgtttggtccaaaaggacatgcaagatttcgataagattatcgtattagattacggtagtcagtataatcaattgattacacgtcgtatccgtgaattcgggattttctctgaattgttgcccaacacgacaacagcagcagaaatcaagaagatcgcccctaagggaattattttctctggtggcccaatgagtgtttacgatgatggtgccttttcagttgaccccgaaatttttgaactagggattccaattctcgggatttgttacgggatgcagttgatcagttttaaaaacggcgggaatgttgaagcatcaacagaacgtgaatatggtaaggctgaaattacagtcactgacaaagacagtgacttattcaaaggccttcctgaaaaacaaacggtgtggatgagtcatggcgacaaagtcacagcgattccagaaggtttcgtaacggttgctgaaagtgataatacacctttcaccgccatcgaaaaccgtgaacgtcggatttatgggattcaattccataccgaagtgcggaatactgaattcgggaacgatattttgaagaactttgcatttggtgtctgtggtgcccaagacaactggacaatgaacgacttcatcgacatgcaaatcgctaagattcgtgaacaagtcggtgacaagaaagtccttcttggtctttcaggtggcgttgattcatctgtcgttggtgtgttattacaccgcgcaatcggcgaccaattggtcagcatctttgttgaccacggcttactccgtaaaggcgaagttgaacaagtgatggaaagtcttggcggtaaatttggtttgaacatcatccaagttgacgctaaagaccgtttcatgagtaaactcgctggcgtttctgatccagaaaagaaacggaagattattggtaacgaatttatccaagtgttcgacgaagaagcaactaagttaaacgggattgacttcttagcgcaagggactttatacactgacattattgaaagtggtacaagtactgcgacaaccatcaaatcacatcataacgttggtggtttaccagaagacatgcaatttagcttaattgaacctttaaatacattatttaaagatgaagttcgtgaccttggcgaaaaattaggcatgccatatgaactcgtatggcgccaaccattcccaggtcctggccttgggattcgggtccttggcgaagtcactgaagacaaattaaagattgtccgtgatagtgatttaattctccgtgaagaatttgcactcgctggcttagataaaactgtatggcaatacttcacagtcttaccaggcatccgtagtgtgggtgtcatgggtgatggccggacatacgactacacagttgggattcgtgccgttaactcaatcgacggcatgacagccgacttctcacggattccatgggatatcttgcaaaaggtttctgtgcgaatcgttaatgaagtcgatcacgtcaaccgcatcgtgtacgatattacgagcaagccaccttcaacagtggaatgggaataaaatcctaatcaaaacaccgcaagtcgtttcgacgacttacggtgttttttttgtgcaatcaatttaggcttttaacggtacttctttgaaatcagacgcaatataaggtaccatctaatcaatgaaagtagggatgattgatgacaaatgggcaacaattagcgaccagtgaaaaaattaaacaagggattgtctttgcggtggcgaagttaattcaaattctccctttaattggcttaaccatgattcatagcgggcagtcagtggcgtcttatatgccgtatatcttattctataccgcgttgaaaactggcttattattcgtgaatagtctaggccacgtgcagaattcatttaaaataactagtatcagtatgctgctagctgctggcgccttattgctattggctatttcgccttggctgtatttaacggacatggcggcctttatcctgggcgccagtgccagtgtgatcatgccaacctatgagagcgtttattatcacgagcgggtggtttggaaatggcaccttatgggcactgaaattaaaacgttattggcttttagcctaataacggttggtctgttgaccatcgctagtcatttttcatatcggttagtctttattgttatcatgctatttgtattgattggctttatcggtatgcaacgcttcgaaccgtttgtgaagcaacttgatgaatcggtgttcgtcgaacaaaccaaatcgcttaataacttggaactatttgtctgggcaaccgcgatggcgtttgcgctaagatatctgcgcctttttgaagctaaatttgtctggttattaatcacagtcgctgtcattgggttagtcgcgctaatcttgcgggtgatcatcacgcgcggcactaaaacgaagatgccgggttggcttttggttgcggctttaattaacggggcgtttgaaacattcttaatgctctatatttttgtcgcaattcaaaatcagagtttgatgataggcgcctacgtgacttacggtgcagggatgattttagcccaagttattagaaagagcgtgcaagggcgcttttcgaagttatcagacttaaaagtccaattactaggatttgttgctggtgcgtggttgatgattacgccacatctaattttattaggcatcttattgattagtttctttggcagtgccaacagcattcttttaaatcatcgcgcttattacaccggcgtcacgacgccggcccaaaccttaattattaaatatcggaatacgtatctcggtagtatcctaatgcaatttatcttgatcaccggcttgatgggcctagccgtaatgcggcaacaagacataacggccgtgattgcccaaatcagtggcagcgtcgcaatgtctgacacaaccagtcagttgattcacttggccggcctgattagcgttggcttgctaacggtaattgccggattggctggcagatacttgccggcggtggatgaaaatccgctgatttaaaagtaaaaaaataacggtccctaaatggggccgttatttttgtggtttttgaggattatgttattacttatatggatcttttttggggatgaaaagtgtaaaatgagtagagaggtgccttctagtggttcaatagttaattaaacgaatatgaatgatctaaaagtatgtccggattctaaaggactgcttaaaaatcaacattcttggttatgaggattgagagatatgttaaagagtaagtaactataaaattcattgtaattatgaactatttaaaagatactacacaatgtagttttggtaaaataaaaaatatagattaggaaattgtaggctttaacatagagtgaggtcattttttaagtgaaaaacatttcatactaaataaaataatattaaaaatataattggggaatttaaaatgcgatctagtagaaaaaagattattgatatgtcatccgtggaagctaataagcattggggggttgctaaaaatgacattaactatgtgtcaccgaagcaacttattgatcaaatttgtaattccagaaaagtcggtgctaatttattaattaataccgggcttgaatttgacggtgccattccagcattttcacagtcgttattgaagattgtcggacaatggatgtcagtttatggagaagcaatttatgcgacaaatcattatgaaaatcagacctacttggcaagtggcgagacaaccgattttatcaaaggaaactatctgtttgtctatggtttaggtaatataggtaatagtaatgttgtgctgggtggcgaaaaggcgcggaagatagtgtttaatcaatatccgcaacgcgtaactagcatcacttggttagataatcaagcgttgtttgagtttgagcaggctttagacgggacgctaacaatttatgccaatgcttttcaatatgggacacatttaattgatcgcgtagccactataactgtcgaagactagtgacgaggtagaagatgaaaacaaaagatgtaacgattaggtatcaaaaaacagcgacggttcatagtgatcgcaatcaactggcttggcttggaaagatagcagttgggacatgtttcttgatgtacgtatcatatatccaacaaattatggctaatttagctgggcaccctgtgtcggcgattcaaccaagcgttgcgatggttaatgcgactttgtggtttagttacggttggtttaaaccacataaagattggccaatcatcatttcaaatgtcccaggaatcatatttgggctggtaacattaattacaatttattaccattaatagcaaaataacccgggtcaattgacccgggttatttttttgatcaacttacgctaaattaattgacaccctttatgaatggtatggtaccataggcgtaattagaaaagcgaagggattcgggcgcatgcgacgttctaaatggataataatcatcattggtttaggagttttaattggcagtggatggtggcttttagggaatgcaacgacgcaaaaagcgcagcaagtcaagcaaacagaaaatgaacagcccactttttatttgcatggttatggcggttcggctcgttcgactgatagcatgatcaaagctgctcgcgaacaaaagaatgcgacacaggtcctcactgcaaccgttcgtaaggatggttcagttgatttacaggggcgttggttagctaaaacgacacgaccaatcgtgcaagttgttttcgaagataatcgcaatcctaactatcaacaagatggtgagtggtttaaaaacgtcttagtcgcggttaatcggcagcacagcttcaaacgattcaacgtggtggctcattcgatgggcaacttgacggccgtttattatttattgaaccatgcgattgataaacagttaccccgtatggcgaagatggtgaatattgcgggtcattttgatgggattatcgggatggatgatcagcctaatcaaaaccaggttaaaaaggatggccaaccacaaaaaatgaacgcgacttatcggcaactgatgggactgcgtaaccagctccctgctaaatcgattacggtgttgaatatctatggggatttaggcgatgggacgcattctgacggacgtgttagtaatgcatcgtcacagtcgttgcggtatttggtgacgcctggtgcgaagacctatcaagaaaagaagtttactggtaaaaaagcgcagcatagtcaattacacgaaaatcatgcagtcaatcaaactgtcttagcgtttttatggtaaaacatacttaaaaagtggtggcgacaaaaattaattttgtcgccaccacttttttaatgttcaagacggtagtctcgcgctgcttgttcgagattcgaaatgagagcttgttgttttggtgagaagaactgggtcttacgataggctaacgagatataaaagattggttgtggttcatccaataaatcaagtaccactaagtcatcagcaggcgtaatactggtttcagttagaaaaccgatgccgacattttcgtgaatcatactttttaagacactaacgtcattggtgcggtaaataatttcgggtttgatttgattgacgtccgataagttcttgaagaccacgggatgcacgaatccttccgcgagcataataaatttctcgtgggctaaatcacgaaaggcgaccgctggtttctgggctaagggactatcaggtgcaactacaatcttaaaatggtgacgttcgatgactttagctgtgatggtatcggtttgaagtggcgtcgcagagccaagaagcgcgacatctagttcaccggcttctaatgaagccaacaattctttggaacccccatcagctgtcttaaaatgttgaatcgtgccgttagcggctagcttttgtgctaattttgagaagtagtaagtgccgataattggtggcaagccaaaacgcaaatcagtagcgttgagattgagcatgtcggcctttgttagttcaatctccgctaatattcgcgcggcatgttgataaagttgctcaccactaggggtaataatcaatgattggtgtgattgatcgcgctgaatgagtttggtcgcgaattcatcttcaaggcgtttgaccgcgtaagtgatcgtcggttgactgaccttgaattgatcagcgactgccgtaaaattttttaatttaattagcgcagcaaaataggccaaatctttaatcttcataaaaactcctgtttaatgcagtttagacgtttcatataaatctattttatcataaatgtaagttttgactatcaaatgttgaggcgtgtatagtgaccaacatgatataaaagaaaaggagatttttaatatgaaagcacaacaaattttaaatgatccatttttaaataagggtacagcattcactgctgaagaacgtgcacaatttggtttaacggggatgttaccacctcacgtgcaaaccattgatgaacaagttaaacaagcttatgcccaatatcaatcaaaagccaacatgcttgaacaacggattttcttaatgtcaatttttaatgaaaaccgtgtgttgttctttaaattattcagccaacatgttgctgaattcatgccagtggtttacgatccaacgatcgctgacacaatcgaaaactacagtgctttatatgtgaacccccaaaacgctgctttcttatcaatcgacgatcctgattcaatgaagacaaccttggcaaacgctgctgatggtcgcgaaattaaattaatcgttgtgactgatggcgaaggaatcttagggattggcgactggggcacacaaggtgtggatatctcagttggtaaattaatggtttatacggctgctgccgggattgatcctagtcaagtcttaccagttgttttagatgctgggacgaaccgtgaaagcttactcaatgatgagttatacttaggcaaccgtcatgaacgggttcgcggcgatcgttactacgatttcgtcgatcaattcgtgcaaacagctgaagacctattccctaatatgtatcttcactttgaagattttggccggagcaatgctgctaatattttgaacaagtacaaagatcaaatcgtgacgttcaatgatgatatccaaggcacagggattatcacattagctgggattatgggcgctttaaatatctctggtggcaagatgaccgaccaagtttacatgagctttggtgctgggactgcgggtgctgggattacccatcgcatcttcgaagaaatgttacaagaaggtttaactgaagaacaagcacgtagccgtttctacatggttgacaagcaagggctattgtttgatgatgatccagaattaacaccagaacaaaaaccatttgcgcgcaaacggagtgaattcgcgaatgctgatgaattaacaactttagaagctgctgtcaaagcaatccacccaaccattttagtggggacttcaacccaacctgggacctttacagaatcaatcgtgaaggaaatggctgctcacacagaacgcccaattattttcccattgtcaaacccaacgaaattagctgaagcagctgctgcagacttaatcaagtggactgacggcaaagctttagtagcgactgggattcctgctgcacctgttgaatacaacggtgtcacatatgaaatcggtcaagcaaacaacgctttagtctatccagggcttggtttaggcacaatcgcttccactgcgaaagtcttaaatgacgaaatgattagcaaagcagctcactcattgggtggcattgttgatccaacagaacctggcgcagctgtcttgcctcctgtgacaaaactagatatcttctcacaaacggttgcgaacgctgttgctcaaagcgctgttgatcaaggtttgaataaagaaccaattgctgacgtgcaaaaagccgtcgcagacatgaaatgggaaccagaatacaaagtactataatttaaatataaatcggtaggagcgtgaaagagttggcagcatttctaacatcattatcaagcgttgtcgaaatcgtcttagtcattgcattggggttttggctacggagttcaaaaaaattcgatgataattttaaaggcacaatttcatttttaatcatgaatgtcgctttaccattatcaattttcgtctcagtattagataacttaacccgtgaaaagttggtcggtttatctggcggcttgatctacgtcttaattagtttcgccctcggttatctcgtggcatggttactaaccaaggctttccggattcggccaggtcgtcgagggacatttatcaatatgttcgtcaatgctaataccatcttcattgggttaccattgaacttggcactattcggtgacaagagtttaccttacttcttgatctactatgtggccaatacggtttcaacatgggcaatcggggtcttcttcatctcaaatgatgatccaatcaaagaaaaaggcgctgctaaaggcaaatttaactggcgtaaattattaccttcaccattaatcggtttcttagccgcattaatttatcttttaactggtttaccattaccagaacttgttgataagacattctcaatggtcggtggcatcgtaacaccaatgtcattgatctacattgggattatcttagctgatgctggtttgaaatcaatccatttcgaccgcgatacagtccttgcgttattaggccgtttcgttgtggcaccagccatcatgattgccatcatgctattcttcaagaacacaacttcaattccatcaatcgaacaaagcacattgattattcaagctgcaacacctggtttggctgtcttaccaatcttagttggtcaatcacatggtgacgttgaatatgcaacgaacgttgtcacaacaagtaccgtcttattcgtggtcgttgtcccaatcttgatgcaaattgttcaatatatctaaagcttaaatgtgtcgttcagctgacactcccctaaatcttacccccagcgcgccgtctcaattaattgagacggcgctttttttgtgcaaagaaacacaaagaatgttgtcaaaggcggtaaagtgcattacaatgaaaacggatttaataatgtgaaggggacgatagcatgacagagaaaatctacactaacttagcacctgaaccattgggaccatacagccaagcgattgcaacggatcaactggtctttatgtcagggcaactcggattaaaagatggccaattggcaccggacttagcgagtcaaacaaaacaagtaatcacgaatatgcaacacgtgttagcggcagcaggattatccctagaaaacgttgtgaaaaccaattgttttttaactgatttggatgactttaacgaattcaatgaagtatatgcgcgattcttcggtgatatcgcaccggctagaagtgccgttcaagttggtaaactaccagctggcgcaattgttgagatagaagcagttgcaattcgttaatgccgtaattgactgaataaacaaccatttgaaaaaagcctccagaggaaattaaatgcatttcatttaatcatctctgggggcttttttgcatgcctgaaatttaatgtttaaagggatgttcatgggtacaaatactgatatataggcattgttgtgaaaatattctaccaatgaaattaaaaaaaaactaaaagcgctagttgtagtattcattaaacacttatttccaagctcttttctatggatgaaaccaatttctgtgtatagtatccttctctaacccgatgttgctgaagcttaacttcattttgcaatgtttcatatttagaacgggaaatcgttaaaagttctccgtggagatcttcaagatcacttattgtaatcccgcaaccattaaatttgagccactttcccacattagacattttatcagccacgggaataatgccagcagcaaggtaaaggctcaatttatactgccaattatatttttcataagatttaaaagtaggtttatgatactatttcttagttaaaatatgagtctagtgactatcggttgaaactaaagcaacttttttgacaacgcttaccaacatgctgtaatcttatttaatatataacaaataaacttatgctaagaagtggtgtcggaatattgatattgctacttaagagattaacttggactttaactttacgattaattgactaaaaaatttacttaattgtaaataatggaggttattgaaatgccttggaatgaacaaaattacccaccatcaatgaaaaatttgaaaaaagtggttcgaaaaaaagctattgagatcgcaaatgcgcttaaagaaaaaaattatgacgataagcgggccatttcaattgctacggaacaagcggaaaaatggtatcaacatcgctctgatttaaaagacgacactccattcaagaagaatttaaggaggcatagctaatgatatcacttttggaaaaacacccaaacaaaattactcctcatataccaatagaaaagcctaaaaagcaattaccacaaagatttccagtaaagactccgcctgaaaatccccaaataaatccagaaaaaatataccctgaaaaacaacctgaagagccggttaggcgtgattaataagccgtttatgttagattacaaattccaatttgaagggggccacataaatcagagtgaattcccatgaggcatactaaatacaatattggagactacgttttaaattgcaaataattcggattaaatttgtaatctacctatagtcaaaataaagccagcgaaagcgaggaggacgtcatgaaacaatacacgaaatttttactgatgattcttgtctctacagttattatgtatgggttaatgtaccttaatgtgttccaattagatcatatttttctaagccaaacgcgactgtatatggcgctaattatgggcgccaccatggccattgtaatgctgttattcatgtggtcaatgtaccagaataaacgtttgaaccgcctgatcctacttggtagtgcggtgatatttgctggctcgctttatctagttcgtagccaagcgaccgtgcacgatgcagcttggatgcaagaaatgatcccccatcactcgaccgcgattctaaccagtgaacgcgcgcaactcagcgatccggaagtcaaagccctcgcacagaagatcgctaaaacgcaacgtgaagagatcacggagatgaaacgattattgaaaaaagttgccgatcaatagctgataaaaaataaggaagttgaccaatcaggccaacttccttattttttaggcttacgcaaattgcaatagtaagttagccagtgccgataaagcacacagacgaaagggctcatgggagttccaggtggatcaggattaggcggcgcggcctttgcgcgcacgtgataattcctttcgaaatatttcagctggtgtacagaacttaagtaagcggcgcgggagatggttgagccaagattcagcttgacgggccagactgggtgtagctagatcgagtgattgccccttaggaaagtaacgtctgagtatacgattgtggacctcattagtggcgcgttcggccgagctataagggtgggcataataagtctcggcaacaccctcaagcgcagccgttagcgtggtgaactctgttccgttatccgccgtaactgtccgcataacgtcaccgaattcagccgtaatattttgcatggcataagccacagattcagcgtctttaccctcgatcaagcggacaatctcatagcgcgttttacgttcggtaaacgttaataggacactctcgctaccagcacgtttgccaatgacagtatcgatctcaaaatgaccaaactcgtggcgcgtttctactcgctttggccgttcttcaatactacgaccgagtaggcgctgatgttggtgcgagtggtgctgggtcgtccggcgttttgttttttccagcagatcaaggttacggatctccaatagttgcgcatcgatatagttgtacaaagtcttcgtacagaccattttggccggcttaaataaccggtgcttacgggcataaccaacagcagcgtccggcgaccagccctcatggcagaacttatcatcaaagtaggctaagaaggccgtcacttggataaattttaatggacgtccacagttttgccgctttatttcatagcgattctgagcggcttcagggctgtaaatttcaaagtagtgtttctgattattaacgcgtttaacttgcgtgactcgaccacgcttgagctcattattgacggtctggtggcagacgcctaatcgaatcgctatttgccgtgctgagcatccttcaatgtgccaagcggcgatttgaccgcgttcgatttccgataaatggtgaccttttgggcgtggctaacttaattataaaacgcgcgccccttcgataactaatggttttctaatatttgtggtagtaatagtatagctcaaatttaacgcaatttcagtttccgcgcaaataatcgtctcaaaaattatcattcttgacatgcgacgcgttatttgacgttagtcatggtttaaacgtgcttattagttggtttgttattcgtccgccgatgtgcgtcctaacgtgccaacacgtgtgtacgccgatttcagtatattcaagcattaaaatgtggtgtcgcagccagctggagtgcaagttgggttgcacgttcgagcgaatcgtttgtttgttgttcccagcgggccgcgagtgtgttggccgggtcgtgcagactagttaagatatgttgggcgacttgcaacgcgtgtggttgatgtaaactggtagccatagtttgtagcgcgtcagctagttgttcgccttcagttagctgtcgagtcacttgcatgggggtttcgatggcaacttgttcgttggcgcgctgacccgcctgaatccaattatccgtactagctggcactggtaaccagagcatcagtaaaacgaaccacgttaagcaggtcagttgggacagatcaacgcccgcaccggcccatgggttcaggtctaagttacgtaattccaagtattgaatcccatcctgacatagttgtgaatgaccaccggcatgacgcaatcgaacctgaccgtaaaattccttggtcgcacttaattttccattatcaacggccgcttgcagtgtttgacaatagtcatttaacgacgcgtacgagaccgtaacacccggccgattggtatacccgctagaactgttgcgtaagcttcgaacgggctgggctggtggcgtaagaccagactgtggccagcagcgtggtgagcagccataaagatacgtcagtagccagcgatagtgcaaataattctgcgcaatgtgcaggtaacagcgattttgaaaggtagtgaaatcacgactatctgtctgggcctgatacaatcccatcatcagactagccgctaagcttacatttacagtgaacacctgacaacatttgacgtcgtcggccatagcggtgagcaagtccttgtcgataggcgacagcgaccgcatccaacttagcaattggaatatcccggtcttctcgtggaagtgtgggcggcatgcttagcggccaaatcagttcaggcagaagcctttgccggacttgttgtgtgagcatcgttaaggcgtgcaacgcagcaaccgcacttgcttgcggttgggtgactaactccaactgtgtctccgcaaagtcccgttgcaggccggacaactcgctgataagtgttggtgataatgccgtatccgccaaatgaccggtcaccgttacccgctggccttcccgttccagcccaatctgaacaacctgtgcattgatcaacgccgtattttccattaataattgttgccactccatccactcacctcgctgattcaacctaaatttatcgtagcatagtcccgaccttggttcactgattatgacctattatttagctgacttaccattacgaaatgagtttccgcgcgtccctgcttgatcatccaaaggatcaaaaaaacgagtacccagtattaccgggtactcgtttttagggtaataatatcgggtctagaatttttggtgttggaaattatttccattccaaaagtactaggccctaatttaaaaagccattgataatggatcaaaaacggccactagggtataccctagtggtcattttcgtttctgtgatatactaggatttataaatgttcattagaactgtccaaaaggagaaacggaaatggctaaaatcggttatgcgcgcgtgagttccaaggagcaacatttagatcgacagttagcggctttaaaaggcgttgataaactattttcagataagttaagtggggctaacaccaagcgacctgaactgcaaaaaatgctggcctatatccgtgaaggcgatattgtcctggttactgaattagaccgcttgggccgaaacaaccaggacttaactaagattatgaacaccattcagaacaaaggtgccaccctagatgtgttgaatttgccgtccatgacggggattgcggatcctaacttgcgtcaactgatgactaacttaatcattgaactgtataagtatcaggccgaaagtgaacggaagcggattattgagcgtcaacaacaggggattttcctggccaaacatcaggggaaatatcatgggcgcaaaccccaatataccgaagatgatccccgcttactacatgcttttaagctttatcgagctggcatgagtgacattgatgtgtcccgaaatacaggtattaaacggacgacctttattcgataccgtgtgaaatacggtattaaaagaaaatagggaccctattttctttacttatagttttggagggtgtttactaaagtttttttcttggaatctgattccgtgtttattaaaccatcgacgagatgtcatacaagaatgacaccctgactgtgtatacatcatgatcatttttcatttacccacttttttattttatttaagaaaaaatgattaatgctgagttaactgatctatccgaaaatacatattggtgtagctaataatataagttgacacccagtcaacccaacactagcaatctcaaaaattggttaatggacactccacttgatcggagatatgaaacacaaataattgttttacatacctattttattattgaaacatttatgaaataaatagcatgcacaggaaatattgtgaatttgttcaacagctttgctcgtatggtttccttgcatcacacccctgataaggttatagttatccttgtaatcattatagaacgtttgttcaaaaaagaggaagtgaattttatgcattggttatgggttttaattgttggtgctgttattggcgcaattgctggtgccatcactaatcggggcgcagctatgggctggattagcaatattatcgctggcttagttggctcatccattggtgaagctattttaggcagttgggggccaaatatagctggtatggccattattccgtcaattataggcgcaatagttgttgtagcagtagtttctttctttttaagtcgtagcacaagataaatttttccctatatgttaaactttttaacaccgtatcaggttatgctgacaaatttgtccgaaaattcggattaaatttgcaatctacccatatgcattgtaagtatgttctgaaacaaggttttcttcttcagtgaagacattgtattcagcaaatttgctttgtaggtctttgtatggaattaatttgttatcttcatcaagtaagatagcacgaccataaccaccgtaagcagcatcaacgtggaagtagaagtagatgccttctttaacaagtttgttacgtaattcagcaatttcgttgatgccgtcaacagcaccttcttcagttgagccaacaacgccgacaaccccaagaattggtgtttctgtgcttgctaattcacgaacgattttttctaattcattgatatccatacggtaatttgaatcaactggtactgggattacttgatccaaaccgataccgataatatcagcggcttttaaccatgaataatgttttgtttgtggaactaaccatttacctaacttgtcaagatctttaccaccacgagctgatttagctttgatttcatcaatcttgtcgccgttagcttcaactaagtccatgatttctttagttgacatgtttgataattcccagtctgtcttgcctgctacaatagtaggatcaacagccttcattgcaaatggaagtgacttgatgttacgtgcataccataaaccttccaagttagctaatgaaccgtcagctacgatgtggccccaaccatttgtgtaacccatcaatgttgcaaattctaaaccaacttcttcttccatttgtgaagttgctggtgatgattcatacgcaacgttattaccattccataacattgcatagttatatgccaaaatggctggtattaatgtttctgagttcatatgaccccagtaacgaccagcattatgtcaaggaactgattgtgaacgtaaacgtgctgaaagttcgtctaaaacgtctttcatgttgttaaccgttccttggaattcaggtgatgtttgttgttcagctgaaatcattggtttgtcttgtggcatgtagttttgacgccatccaagatgttcgtcaactaacttacctaacaaatctttgtaaagttgaccattttcagctttatcaccgataaatagagcagataaatctgtatcttttgcactaaaactattgttactcataacaaaaaatcctcctaaattgtagatatagtataaccccaatcaatagaatacgctcattgtccataaaagcaaacacatgaaagcgattccgattttttagagtacgaaaaatagccgtcaaacaacgtttgacagctacctttgcagttgtattttggggttatactatatgatctacattcacgaagaacccagtaacattcagtatagatacaaaagccttcatttaatttttggaacgtctctagtcagtaacacgtgctaagaagtaattcttcttcccacggcgaataatcacaaacttgccatcaaagctagtcatcgggtcaatcatcgcatcagtttcttggatacggtcaccgttaattgtaatggcaccattttgaacatcttcacgtgcttgacgttttgaagattcaatacctgtatccactaagaagtcaacaatgtttttagcttctttactaatttcaactgatggtgctttaccaaaagcttgttctgcttcaacaacatctaaagctttgatattaccttcaaaaagtaattcagtaatatgttccgcttcatctaatgcttcttgaccgtgaacaaaacgtgtcacttcttgtgctaaacgtttttgtgcttcacgtttttcaggttctgttgcaactttttgtgccaattcttcaatttcgtcttcttctaagaatgtgaagaatttaaggtatttaataacatcacgatcatcttgatttacccagaattggtagaattcgtatggtgaagtcttttcagcgtcaagccagattgcaccacctgctgtcttaccaaacttagttccgtcagctttcaacattaatggaattgttaaaccgtatacgggttcgtcgctaccttcaagtttatgaatcatatcaatccctgaagtaatattgccccattgatcagccccaccaatttgcagttggatgttatgttcatcatgtaagtgtttgaaatcaattgattgtagaatttggtatgtgaattcagtaaatgaaatccccacttccaaacgactagcaacaatatctttagctaacattgtattgatgttgaaattcttaccgtaatctcttaaaaagtccaacaatgagatttttgataaccaatcgtagttattaacaaaagtaacattggcatctttaccaaataatttccgcatttggtttgataaagcttcaacatttttttgaaccttttccattgtttgtaactggcgttctgaattacgaccacttggatcaccaattgatcctgtcccaccaccgattaagatgtatgggtgatgtccagctaattggaatcgcttcatcatcatgaatggaatcaaatgaccgatgtgtaaactatcaccagttggatcagccccacagtataaagaaatcttgttgttttctactaattcacgcaatccttcagcatctgtttgttggttaatcgcatcacgccatgttaattcatcaataatattttttctcatcaaaatttcctcctaaattaaaaaagtcccagcaatctttaataaaataaagattactgggacgaaatgtcattttttcgcggtaccacccgtgttatattttgaaagtgcactttcaaaatatcactctagattttaacgtaaattcaacgtacgatttgataaaacaaaaagtgtaattcgacttagaaacatatgtcaggtctcaccaaatcccgactctctgtaatagtggttactaattctactgcgcttttcaatcgctttattaacttatgtgcttatcatagttcacatgataaatgaagtcaacacttttatgctatttttttataaacatgaacgattttattctaatttaaatttaattaaattaaattagaatagtcgtatttaattcctctaaattaaagttttacaacattcgcagcttgtggtccacgtgtgccttcaacgatgtcgaattcgaccgcttggccttcttctaatgacttgaagccttcgtcttggattgcactgaaatgtacaaagatatcgtcttgaccttctgctgagataaagccgaaacctttttcattgttaaaccattttactgttcctttttccatgatgttactccttttaaatacacaattattatctagccaccagaatcggtcatctaaacaagtcaattatacgcgattttgtaaccgcatgcaagcgtaaaataaattaattgagtttatatcgggtccgccgttgatattgttcgccaggatgcaaaacaatattaccaaactcggtatgatggatggcatctggcatcatttgggcttcaatcgccactgcttggtggggttgaattgcctgatttgttaagtttggttcgtccccgaagccattggcggtataaataacgattgcattcccttctgtatcaattgtgatcgagcggccactttcgggatcgcgtaaaatcgcatccgatttacccggcgtttgattcaacaggaatggatgatcaaaaccaccgaccaatttagtttgcgtattttcactatcaaaagcggcttgcaaagctcgcggttgacgtaaatcaaagacagagcccgcaactgggactaattccccggttggtaagccgtctggttgaatggcaccaaaacggtcactatcgatttgcaatgtgtgttggccaacaaattgatcaaagtcccccgtcaaattcagatagacatggcatgttgggttaaacaacgtggttttatcagtcgttgcttgatagtcaattagccattcattggcctcatttagcgtatacgtcgtggtcaccgctaaattaccggggaatccattttcaccatctggactcgttaacatgaaaacgacactaatcgcatcatctttttcaaccactgatgattgccagatttgcgattcaaaactattggggccaccatgattcgtgttggcgccattattaatcggtgcttgataatcatgaccatcgagtgtaaaagcaccttgaccgatgcggccagctacgcgtcccactgtcgcaccaaaataagcttgttgctttacaaaatccgctagggtgtcatagccaatcacaacattggccatctgaccactttgatccggcatcaccaagtgagtaatcgttgcgccgtattctgtcacggctaattgatacccctgacgattctctagccaatactgccaaaccgtttgaccatttatttctccaaatgcttctcgccaatacttcatgaatgtccctccttataggttaaacatgttgcgtaaatttaataaatgctgcctgaccttgttcgttgcatttgaaaacaccagcgtcttctagaacgcgcatgaacactttgccgacttcagtccgcactaattccgttacgttatctgatgtaatcgatgtgttagcggctttaatcgtatctgcccattcttgatggtaagcggccatctggtttggttgatcgcagagatagtgttcaacctcagccatttcatctttgagtcgtggtggcaaaattgctaagcccatcacttcgattaaaccaatattttcttttttaatatgttgcacatctgcatgtggatgataaattccatctggatgttctgcagacgtttgattgtcgcgtagtaccaaatcaatttcgaattgaccgtctcgcatccgcgcaatcggcgtaatcgtatgatgtggtgtgccgtcttctgagtgggctaagatttggacacttggatcgctgtaattttgccaactagttaaaatttgtgcagcgagtgtttccaaatgcgttgcattcgcactcgtcaaacgaatgactgacattggccacttcacaattcccgcctgaatatcattatacccgttaaaatgtagtggtgtctcgattggcgccttagccattggaaaatcgtgacgccccccttgataatgttcatgggttaagatcgaaccaccgacaatcggtaaatcagcgttactcccagcgaaatagccggggaactgcttcacaatctgtaataaatttttgaaggtcgtttcattaatcaccattggttcgtgttgaccatcaaggaaaatcgaatgctcattaaaataagcatatggtgaatattggaagccccaagtctgacctgccaattcaaaacgaatgatgcgatgattacgccgtgctgggaaatctaaacgccccgtatacccctcattttccagacataattgacatttggggtagccggtttgtttcatcgttttggctaacgcaatttgtttcggatccttttccggcttcgataaattaatcgtgatttctaagtcgccatagtgcgtcggcacttgataagcgatatttttcgcgattgcggccactttaacgtagtcgttggcccgacttaattcataaaagtcggcaagtgcttgttggggatcactctcgtattgatgccaaaaatggcggttcaccgcacttggtaatggcgtcaccaaatccatcaacttcgcccctaaaatatcttgttctgccgctaaattctcaatccggctattcgcaactgcaagacgcaacaatgcgtcctttaatccgatgagactttgatcagtcaccgcaacgttactgtcctcttcaccaacaaggtctaagacgagattaaataagtactgttggtcttctgctttataaagtgtgtcttgaaagataatcactttttcaataaatgtttgaatcaattctcttgcttgcatatgctttcctctaccgatctgcgtatcctgctgtaaaagcgcgcttgtgaattaatggcggcttgatggccggtgacgagactgtcgacaacggccacatccgtgccgcgttgaattaattgatcaacggtgtgtgagccgatgtagccggcgccacctaatactaaaactgtcatcttatcattctcctcttcagttgactgattaacctaattttttagcgccatcggcaatttctgccacgtagaaacttggcgcatacccaatcttgtctgtataaactttagcaacattcgtttcaaagttgtcgacttggtctttagcaacaattgcaatcgcacaacccccaaagcccgcaccagtcatccgagcgcctaagacccctggttgttgccaagcggtttgaacgagtgtgtctaattcgatcccagtcacttcataatcaaattgcaatgacacgtgtgacgcattaactaatttgccgaaacgttcaaggtcgttgttcttcagggcttcgcgggccttcattgtccgttggttttcagaaaccgcatggcgtgcacgtttcaacaagttttcatcttgtagcatgtatgtttgtaaatcaaaggtttcgttatctaaatcgcccaatgattgaatatcattcttcgtttgtaaaatggctaaggccttttcacattcactgcgacgttcattatattttgaatcggccaattcacggcgtttattagtgttcatgataataatcacgttgtcttgcaaatcaattgggactaaatcgtaatccaatgtgttcgtgtctagtaagatggcatggttggctttgcccattccaacggcaaattgatccatgatgcctgagttaacgccgataaatttattttcaaccatgacaccggttttaacaaggtcgacacggttaatttctaaattgaattggtcttctagaatcacacccattaataattcaattgatgcggatgatgataagccagcgccgtttggaatattgccttttaaataaatgtccaaaccactgtcgattgtgtaaccttgttcttgaaggtaaacaatcatcccttttggatagttcgcccagttgtgggccttttgataagataagtcgctgaggtcaaatgaaatgacacccgcatcttcaaagttcccagataataaattgattgtttggtcatcacgtttagcaacgactgcatatgtgcccaatgtaatcgcggttgggaaaacatgcccgccgttgtaatcagtatgttcaccaatcaagttaatccgacctggtgcgaagtagctcgcttccggtgctttgtggaatgcgttttcgaatgcggtatttaattctgtcatgttcatagtaaattcctcctttattaatcgctttcattttactaaacatttactaaaaaatcaatcttttttgttaactatcgctttcttttcattggttatgctaaactaagtaatagtaaacattgaattgagaggtgcaccttggcaacgatcaaagatattgctcaactcgctaacgtttcgaatgcaaccgtttcgcgggtcctaaattatgatcaaacactttcggttggcgatgagacccggcaacggattttcgaagccgccgaaagtttaaactatcgtaaaaacacgcgcaaaatgaaccagcaacgcggacgcattgcgattgttgaatggtataccgctaaagaagaattggaagatctatactacctctccatccgacttggcgttgaaaagaaactcaaagaacttggttatgacgtaacacgcttctttcaaaacgatccatttgatacgctccatgatgctacgggtgctgtggtaattggtaagtacagccctgcgcagattaagcgcctaaaaaaactcaaccacaacctcgtcttcgtcgacatgaacacgctcgattgtgaagtcagctgtgtgatgaccgacttcaaaacaccaattaaatccgtaatcaatcattttacaaccgccggcttaactaaaattggtatgttaactggtcaagagagcactgctgataatactaaattgggaccggatccccgttttattcattttaagacgttactcaaagctcaaaaaaactatcaccccgattggattttaaccggtgactttacacccgaatcaggttaccaactcatgatacaattattacaagaccaaagttccgatttaccagaagccctcttcatcgccaatgatgcaatggcagtcggcgctttacgcgccttacatgaatcaggcatcaaagtccctgaacaactcagcctgattagtttcaacgatacctcaatttgccaatacacgttccctactttaagttccgttaaagtttacactgaacaaatgggccaatcagctgccgagttattggttaaacaactcgccgctagcgaaattatcccccaagtcattacgattggcacgacgctgacactacgcaatagttcaaaataataccttcagcccaccgatgatcaattcatctcgtgggtttttatcttgtctcaaatcaattttcattaataggagtatctcttttgaaaacgaaaaaaattagacgaaccatcttaaccattgctatcttggcagtcggttatctcggtggtcgcaacaatgtcttacaaaatgtgttccctgctacagttgctactgagcaaccagctaaacaaacacccccagtcagtcctgattatcaagccattgctgatcaagattttaaaagcggatctgcggcctatctaccaattaataacgatcaaagccaattaacagcaacggattggcaaggtgaaaaaatcgtctatgggcaactcgaccagcttaaccgaacaactagcgtcacagcttacttatcaaagcggaatctgggcaaatcagaaggccggacgcgccaaatttggaatccaacgggttggcataatcaacctctgattgtcaatgaccgccgaatcacaccgcaaaatcgtggccacttgattgcttatacactcacttttaattttgatcagaatggtaactttcaagctggtcaaccaggcagtttagataatccacttaacctcgccacccaaagcgcgtacagtaatcagaaaacgatgcagatttttgaagaaaaagtccgcactgcgctcgaagcaaacaaaaaagtgatttacaaagtcaccaccgtttttcggggtaatgaactgatgccgcgcggttactgggttcaagccatttcaacagatggcacgctgaatttcaacgattacgtctggaatgttgaacctggcgtcgcattcgattacatgactggtcgttctcacttagatgctagcatgcaagtcaaagacggtcagaatattgttgaccgcaccaaacaacaagtcaaacaacttttctaaacaaaaaaaaagaggtagcaaccagaataattctagttgctacctcttttgctagcttatttttccattgccttacgcaatgcagcggctaatggactttccgctggttcatcttcttggttcactttttgaatcaagcggcgttcttcatgtttagagattttcttcttacgatctttcttgtcgagcatcttttcggtcgtcccatcattaagacaccggaagtatgcgccgccttgcccttcaataatcaccattttcttgtgacattgtgggcagcggtggttggaaaccttcggatctttccgacgccgatagtgacagtttgtgcagacataaattttaccgtcacgcgtattgcgttcttttaacggatgatcacattccggacattttttattcgtcactgcaaaatcgcggtattccgtctcactctttttaatctcaccgaccaaggtcttagtggcaccctcgatttcagtgatgaacgccttcggattttcttcgcctttggcaatcgcttcaagcgactgttcccattttcctgtcagttctggtgaaaccaaggtctgattaaccaattttaaaagttgctgaccttttggcgtcactgctaaagcatgaccttgtcgttctaggagttcactacggactaatttttcgatgatttcagcacgagtggctggcgtccccaaaccgtagtgttccatcttcccgagcaacgttccttcagttaatggcttagggggcgtcgtcaattgttctttaaccgcaaaattagcccgaactaccatcccttctcgccagtcgaccgtcgcggttggttgcccctctttatcggcagcatgccaaccttgttgcacgacttttgtttgcttaaacgtaaaggtttgatcaccaaacttaacggtggctttcgtaacagctgtcacgtatggatcagcaaacaaccctaagaagcgttccacaatcaagcgatacatgcgcagttcatccgtcgataatttttcggcacgaacgggttcttcagttggaattaaagcgtagtgatccgttactttgccatcattaaagacggctttttgtttgacctgactgccttgccccaagtattgcttagcacgtggatcaaatttgactaatgccgacaaccgttccttcaaagtcccttcgatatctgttgagagatatttcgaatccgtccgtggataactgacaactttatggatttcatacaatgattgaatcaaggataacgtctttttcgcggataaaccatactttgcgttggccacttgttggagttccgttaaatcatatggtaaaggtgctgattgcgatttctgcgttgttttgacgctgaccacttggcctttggcttgttgcaattgtgcaactaagtcgtctgccgcttggcgcgtcttaatactttgcggatttgctaattgtaaggcggcttgctgttgatcgaccgtcaagtgaattgtgtagtaggtttgcggtttaaaacgattaatttgttgtgccgtttcgttcacaaaggctaacgttggtgtctgcacccgaccagcggataaattatcttcatacttggtcgtcaatgcccgtgtcacgttcaagccaatcaaccaatccgctttgccgcgtgctaacgctgatgcgtacaaattatcgaattgcttggctggttttaagtttgcaaaccctgctttaatggccttagtcgtttgcgatgaaatccagagccgttcaaccggcttatcgaatttaatccattccaaaatatagcgcgcaacggcttccccttcacgccccgaatcagttgcaatcaccgcacctgaaatatctttgcggttggcgaggtgactgatagcttttaattgtccacccgttttaggcaatggctttaaaccgatatgcttgggaataatcggtaagtcttccaaacgccattgttgccattcttttttgatatcctctggtaattgcagcgataacaaatgcccaaacgcccaagtgatgacgtattgatcgccctcaaaataggttttagttttctgagttgttcctagaactttagcaagctctttggcaacacttggtttttccgtgataactagttttttttgcatttaaaattcctcttacttcaattgatcaaaatagtaactgactaatagtataacgcatgttgagaaggaacaacccagaaatcgcgaaagtatcataaataataatatttcaacagccaaaataaaagattctaagaaactgaattcttagaatattcttttttatcaacggttatacagaccgcggttaatgatgaaggaacacgccagaaattctctggcgtgtttttttgtggcctaatttggacatgcgtcattgtttttgttataatgaaaccaccattgaggaggcactaacttatgcaagtattgattcttgttttaacttatctaattgccgttgaacacatcggtatcatggggctggaaatgtttgccagtgctgaaacaaaggcgaaagcttttgacatgccgctggactttgtcaaactaccaaatgcccgcgtggcactggccaaccaaggcatttataacggaatgttgggcgccgtaattatcatggtcaacctgttattagccggccaaacgctcaagattgtcctcgccctattaatgctctacatcttcatcgttgccctttacgggacatttaccgccaccaagaaaattttcttcttacaaggcttacccgctttaatcacattattgttaatcttattcttctaaaaaagagctttaatcatgacaaatccaattctcatcaccaccaccgaaactattcctggtaaaaaatatgaagtgctcggtgaagttttcggtttaaccactcaatccaagaacgtcttcaaaaacatcggcgcttcattgaaaaatgtcgtcggtggcgaaatcaaagcctatactgaaatgatgactgaatcacgcgatgtagccatcgaccggcttcgccaaaatgcacttgaaatgggcgcagatgcggttgtcatgatgcgctttgattccggttcaatcggaacagatatgcaatcagttgccgcttatggcacggctgttaaatatatcgactaacaaaaaaagatgaacggttccctgatattcaggaaatcattcatcttttttaatttacttattaattctaatcaacaacttaagccgctggtgctgcgggttgtgcgctatttaaagtccacgtaatgttgctcgagaatgtatcaccagccgcaagttgaatacttggattggcacttaatgctaatttcccagcaacttgccatgttttcgacatcttatccgtcataatcggtgtttcagtaccattatcagataatcctacgttcgttggcaagccagtcatattaatggctgtgctgcttaattgtttgcctgtggttgatgccattttactcatcttcgctgtcaatttccaacctggcgttgctctggtatccgtgattttcaacccatcactgacctgatattgcttgtcctgagcagttgtaccaacataaatatcttttgataagacgttcccaaatctaaagctaggcacttgatccaatgacaacttaccaactgctggttgcgcttgtaattcagcttcgttagaaacaatcgtaactttttttgaacttccacttgattcttccgttacgttagtcgttaatgttagctgtgctcgataactctttccagccgtagttgcagctgcagcatctttcatgaaagtactatctttactaaaggttagtggttgttccgtatttaagttcgctaaatttgtaatgtcacccttaagattagaaacaccactattagtagcgggggttattgtcttatcctcaccatctgtaaattgccattcataatgccaattactcgttgaaccagatgccttagctaggtctgataaaccatcaactgaccaagtcccaccgagattcgccgctttcttgtaggctgctaacccaccaacataaaccgttttctctttagagacattctttgcagcaattttatatttagctggaatccctggtgtattcggatctttattcaattttccagtataatacgaatctggcttatacttttcaccctccacatcaatcgcttcgttaactttattcacttatttcgtgcgtttaatagtaaagtgattaagcagttggtgcagttggtgttgttgatgaaagattccaattaattgttgttgtgaaactctcatctttagctaaatcggctgctggatttgctgctaatgttaacgtagctgcttccatcttgaaattatcgacaccatgtttcccgttacctttaaccacttcaacggcaggagaatcgtccttaacagcacctgttaaagtttcaccaagtgaaccagtagaatctaaattcaatattgcgcctgttagtttattagcatcatctgtgaattgagccatgtcagctgtcaacgaccagtcagatttgcctaaacgtatatcagcaatttctaaagcgccagctgttttagcaactttaccagtaaagccagcataaatctcactagcttcaattgtcccaaagctgaaacttggtactgattttaatactaatgtcccattttcaggatctgttgggtttgttggatccttagcaacaacactaaagtcggcttttgatgtttgcggagcaactgcgtcagctgatactgaccccactgtcattgctgttggtgctaccattgttgctaatgctgaaaataattttgtcttcattgataattcctccaaattattattaattacatttaatatagtagcacgcaattcaattgccggataacaaaaaatagataccatacggtatctatttttacccttcactaattattcgttaaaccgattccaatcctgtcctagcagttatttccccattaccattcttctagtgtaaacagcttgcccggaatgcatgaccgcatcatccacgattgagactaagcgtgcttcacgggtaactgccggtgtccaattttcatcaattatctctaataaagactcgtcagtaacttcagccaggtaatcaagcgtcaattgcaatgcgtctgctaagtaaccaattaataatgctttatcgatgataatcactttggctgcttcttctggtgaatgcgaccaatcttgcgtttcatcaggtagatctaatgcaaatttttgtgaccaacctgcacgtatccacaatggttgtatccctttcaaatccgcaatctgataatccatttcacgggcagtatgccatactaaccaggtcaccgatttaattagtggctgcggcattgtattggcctcagccactgtcatttgttccaatgtatcgagtaatcgttcttgagcgcgttcgaccgttgcacttaatagttgcgttgcatgcatcttatcatcctccatatctaaaagttaaccccattgtatcattaaaccactactaggcctttttttatgaatttaccaaaccattacgaagctttacactttattttcactagaacaacaaacactttacattattgtttatgcttaaccttgtaaagaataaaaaatcgttttacaagaagcaatcaatatgcgcatgagccaaacaatcatcccttacgtggcaacaacaactttattacttttggcagccggctgtaccccacaaaaaaatactaaacaatcgacagctcatcaatccacccttgtccctaaacaaaacatgagtcgccacattcaattagccggtgcgattaatactcgtgatctaggtggaattgtcacgaaaacaggtgccagaattaaagccaatcggttaattcgttctggtgaattagctggtttaacaacgaaggataaacagaagttaaccgttggaaaacaattaaataacatcgttgatttacggactagtagcgaagttgcggctaaacccgatcccgctttaagcaacgtccactacaatcactatgatgtcaccaagtctttagggacttcggcaagtcaagctgactttttcaagaatctcgataaggttgatggtgaagctttcatgattgatattaaccaaaaattggttactgatcccgcagcacgcacgaactataaacagttctttaatgtcttattgaataataaaagtggtgcgacactttggcattgtacagccggtaaagatcgtgccggattcggtactatgttagtcctcagtgccctcggggttgatcaaaagagcatcatggacgactacctcgcctctaataaatatcgccgcgccgaaaatgaaaagacaattgaacaaattaaggtggcaactcacaataaccccaaagccgttaaaacgatcactgcaatgatggccgtccgtaaaccctatctacaggccgcatatgacacaatgaacaaagaatatggtggcgttaatggttatttgaaacacgggctgggtttgactaaggcggatctcaaccaattaaaaacgatgtatcttaccaagagttaatgcttcatcaggtagattcactattctcgtctctccatttttttggtatactgctccttagaatcaatcagttaaaggagcctcatcatgtcacctgctcaacatctcattttattattgatcgtgatcattgctgcaatcggcgtcttaagttcatcagtcatcttattcatcgcccaacaaaagaaaaatgaccaacttaagaagaaatcgaatgtgctcttttgggtcagcatcctcgtgatgatgatctttctgaaactaatcgatatgcttcaataaacaccaaaaagcatgccagtcaaatttgactagcatgctttttttgcaatctatcttctaaaaaaccacccttaattctttgctaagttacaaaacttggtctaagcaattttattgttccccacctttgaggatgttatcttaactactaaaggaggtgtcactatgaaaaccttagacaatatcgcgcttactttattaatcgttggtggtttgaactggctacttgtcggtctattcaaattcgacctagtcgctatgttatttggcggtcaagcagctattatttcgcgcatcgtatatgtccttgttggacttagcgcattatattgcattaagttatttgcacccatcaacagcgcgcagcatgaatagctttctggagcggctttttatagggaccaaacatcctgctcgtctcaatcgctatccattaacgtgttggtaaaactgttatttcttttcaataacgcaaaaaagcgtgctagtcagcctcgactagcacgcttttatttttttatttacttatacacctatgttgatgaaagcattgcatttaagtttatggtgtatcatggtgttatacaaattaaaattataggtagtttagaatgaaaaaaatttattttttatgtacaggaaattcttgtcgcagtcaaatggctgaaggatatgcaaaaaaaatattgccggcaaatgagtttcaaatcgagagtgcagggattgaaactcatgggttaaatctaaatgctgttaaagttatggctgaagatggagtagatattagtagccactactctaaattaattgatctaaattatttgaacacttcagatttagttattactttatgtggtgatgccaaggataaatgtcctatgcttccccctcaaaccaagagtttacactggcctttatctgacccagcgcaagccacaggaactttagaagaacaactacaagaattccgtaaggttcgtgacgaaattaaaaaattagttacaagtttgaataactacgttcattaataaaaaaacgccatacagtgccgcagtaaaacagtccaattaatttattgacttctaagtaaaataccaggagttttgctatgagttaactatgatcctaggtggtcactaaaacattccttaatttaggggctataattataaattagataatacattagaagctggagacaagattgtctagataatgtgtgagataaaatttttggcaggttatcatacataagacaaaatgtttttaaaactgataacgtatttatttcacaacaattacgcatttatttttgagaaaaatataaagcaggaggattacaatgctgaaaacttattctttaacaaaagatacattattagtttcgtcagaatcaaatatcaaaaactcttctgttgtctatgtttatggtgacgaacgagaatatatcgaatcttttgaacataaatatgactttaaaataggcaatatactaacgtttgatgaccgagttgcatatgacacgatgatagatcagaacgatgaaaaaagtttgctcgtaagttttttgtttcccgaggtacatgaaggtgggcatctagataatctgacgacatctgttgttttcttggtatttaagaataagttgataatttttacaaaacaaaaattaaaattcattcccgaactcttatccaatatggttttacgtgatgtcaataatttcatgcaggaagtacttttaaagatcatgcaaaaagatttccatgtgatgcttaacgaccttcgtggagtcaagggaaaaattgatgatttagaatcagaaatatcaacgtccggtccactcagaccaacgtttggtgatttattgactcttcaaaaatacatgatagctttgtcaacaacctatggcgctaatcacaaagcgctggatttcattaacaaaaatttcacaactattaacgatattgattttaccaccaaaaaaataattgatgagatatacgatacaagcgacacaatggatagaattattttaggttacagccaatatttggatgatttggaagatatgatagacaatatgatttcgtatcagctaaacatgattatgaaaactctaacagagatatcaatcgttttgactattccagcgattatttttggcttttggggaatcaatgtccatgtcccgtttgaaaagtcttcttatggtgtttttgccgtattgattatctctgctatactaagtctaatttgctggtttttgctgcgacgcaaaacatatttgtaaagtatttgtgataccctaatatgatttaaagcagaatttctttgttgactttttaaaaggctgattcctttcaataatttaatagcttcagcggcttccttcacagtatgagagttagaatattcaaagatagccatattccggctatctttttttcttttgggtctaccctccttatagttgggattgtgttgccttgcaaatattttaccggcttgcgtacgctcgataatcatatcacgctccatctccgcaaccgatagcaaagttctgacaatcatacgcccaattggggtgttatctatcgttcctaaatttgtactaaaaatcaattttttaaggagctaaaactatgcaacaagttgtcttacccatcaaagattcaaacgttctcaaagaggtgcaagataccttactcaataatttcaaagctggtcagcgtaactatacaatttttcaggttgggaaagcgacgctactaagagtcagtgacgttatgtgcctaaaacaagcagatatctttaatccggaaggctccattaaacaaaatgcattcattcacgaccgaaaaacaggcaagcctaataccttgtaccttaaaccagttcaaacagagcttttattgtatcgtcaatggctgcttgatcataaactagaatctgaatggctctttccgtccattcaacacccagaacggcatattacggagaaacagttctataaaatcatgagcaaagtcggcgatcttttaagcattaattaccttggtacccacactatgcgcaaaactggggcttatcgcgtttatacgcaatccaattacaatattggcttagtcatgcacttattaaatcattcaagtgaagccatgactttagcttatttaggcttagaccaagccagtaccgaaactatgttagatcaaattgattttggttagttttatttggatttttagttgttgccgaaggcaacttctgagacagattttaagcacaaaacctccactaatttttagtggagtgtaagtgcgccttgaccgagccttgctcggtttgcggactcacatagatgttctatgtgtaagtgcgcattaaactcatttcattccgtttaatgacgctaaaaaatagctaacttgatcattaaaataaaaggttttttttagttcaatgcgcacttacacgtcaactaactttgacgtgttttgataccccaaaaattgtattagatttcgctacgctcaaacaaatctttttaattgctttacaccgtttttctttctaaacttaatcacaatctttgaataactaactataaaaagatgcctttaatttaaacctgaaataattagctaatgttaggagtaactcagatggacgaaaagaaagtattaaagccaattgatgaaatgcttgctgatcctgggcaagttgatattcaagaattgtttgaagcttttgtcaatgaacctggcgagatcaaaaggaatctgtatgattccctggatacttatattttgcaaaaaagacaagaagatattattaatcgtcctggcttcgttatttagccctctaaaatcctgctgagggctttttatttttgctttggtataaatatatataaacagtctcaaaatcgctagaaacgagaaataaggcccttaaaaacgaatatagcagttagattcttgttaagattcagaaaaactaactgtttgctgtcaatggtagcggacgagcaaagcgtgggagcatagtgacttgaatttaatgtgagccgatttttgagtcgctcctttgtgttttttatttgaggtttggctctggtacagtagtacctcttttaaacctcttttagacccctatttagtcctactctcctaagggttacaggactttatcgactacattttgtctgtttatcgactacgcttatttacttctgtattcaaataaagtagtattattcaaggaggttattttatgagcaatgaattagttaaatatgatccagaactgaatacaattcctctgagaagatttactcctgtagaaatgaatcttttcttttcggttgtttctagaatgcgcgataaaggtgatgatactgttcggtttacttttgatcagttaaaagaattaagcgcgtataagccgaccgcaaataatcgatttattgatgacatacaaagtacatatcaaaaaatattaggtcttagatttggctctagaagtaaagatggacttgatagagaaatgtttgtcatgtttactcgatttgaaatcaagggttcggcagaagtcccttatgttgatattcaaatttaccccaaggcattgaaacttctaaataatcttgaaagctgggttcgatatgctttagcagagttcagagatttaaagagtagttatgcaaaaacgatgtttcgtctccttaaacaatttcgaactactggttatgcttatttttctaaaagtgatttttttgaattacttgatattccgcaaagctattggaataaacctgcaaacgttgaatccagagttattcagccaattaaagaagaactaactcctcttttcaggggtctaactattagaaaaaaatatggtaaaggccgtggcaagccggttattggttactcatttacctggaaatcagaaaaaaagaacgcagacgacttctcacaagggcaatttcaagatgaaagacaaaagcttttcaatattcagcataatagtgaactaacagaacatcaaaaatggcgcgccattgataaagttaaggggttaactttaggctcaactgagaaacaagcggtggctgagaaacaagcggaacacgataaaaaaataagagatcaagcaagaaaagaagcacttgctgaactccgaaaggggtttggaaatcatgcctaaaactattagagaacttgctgatgaattgggcgtttcaaagcaggctatatggcaaaagataaaaagagatgcgtcaatcgatttacgtcaatttacatcaacaaaaggcaatactgtttacgttgatgttgatgggcaaaaagctattaaagcaatgctctcaaacgattcgtcaacaagataccgtcaacaaaaagatgatgttgacgacaacaaaaaagatgcggttgatggacaagatgaagtgaaattccttcgaaatttagtatcagaaattcaatctgaaaaaattaaagaaaaaaagcgcggtagatttgtaaaaatctaccgcgcttttttggattaagcaaacattttcttagttgcgcgcatcaatgtcttgatgtcacgatcataacgtggtgtatcgactaacttggccattggaatgccagcgaagtgataagctgcaatttcgccagaacgaacagcactttgttcagtgaaaatcatctgataaggttgttcaacgaattcaccagtgaaggctaagttggttgaatgttcggggatgacttctggacgctcagttttggcacgattattaaagagtgctgaagcatatggcatatagacaggaatgttattgatgacactgtccataatttcagcttctttttcacgaatattgattgggccaggatcaacttttgatagttggccaattaattcttgaagcatttccttacccgtcatttcgatgtaaggtttatccacaaattcaccgttacgacgtgggtagaggaagtaaccccagataaccgcttcgtttggtttttgcgttgtgaagtgtggttgatggtgaacaacaatcgacatattcacatctttttgaccaagtggtgtgattggtttcgttgataggaacgaattcaaagcattcccaggaatttgcgttgtaatccgttcgatttcgtttaacaaaatatgattcttagtcgttaaagtgaagctgacccactcactggcattgcggtcagcgaagaatttatcgggattgccaagattatagaatttagaagcgacttgtttccacagaccggcagcagcaccataatccatgttttcagctgctggtgtattataatcgccaagtgttgcggaatcggtaattgacccgtttgtgaagatgaccgctgtgtcgtcgtccaccgtaacgtgttcaacttcatctgtctcagtattagtcattgtcataccagtaaccgtaatttcatcggtcatctgagtctctttaaagtctaagtcagtaatccgtcgattgaggataatgtgacaaccttgcgcttttaagtagttaatcagcggcagcatgatactttcgtactgattgtaacgtgtccggttaacaccgactaagtgttcaatctgagtgaattcataaatcatttggtgcatgtaacggcgtaattcttgtgcggaactttgggttctgaaagcaaaggtggtttcccacatgtaccagaagtttgtttggaacatatgtggatcgtccttgaagtattcggcaattgaaacgttgtctaatttttcttcttcagaatcgggcatcataatcaatttggtcattaataaccgatccttattattaaagccgagatgaccagcatccaaaatacctttactaccttctaataaacgtgctttgtcgaatgtgcggtgttgagcatcgaatgaacgggtatcttcttcagccgtcatattgggttcagttgctgaaggaatccgacctagaagatccattaaatcgacataagtccgatagttaagcatccgcccaccacgtgcaacgtagcccttagtattttcgagaggatggtttttattccaatattcatcggttgtttcggaaactgatgccccatcgtttgaaccatggtcatctaatgaatagaatgtaatcgcatcgccagaccaaccgccttcttgaattaaatagactgctgcggccatgttagaaaggccagcgccaatcataattgcttttttcttaatcatatgaaaaacctcctagattcagtttagaaatgacgagtgactaacggctttcgaatttttcgtaatccacagaatcgtctctaaaaagttccattttcttagctaataaacaagcaccggttgctgtaacacctacaaaaataaggctgcctaatagaaattttttcatgtttctcgcttccttccattaactacttttgatatctatattataccgcgaattcctaaaataggaagataaaacccttacataggaattatcagtggttatgatacgattattgatgggattaggccgctaaaaatcagaatagttaagtttagtttaaggctcttattagtcaggcataattcctagggaagcactaacggatttaaaaaaagtgataggcccccaaataatggttgacctcaagtcagcttgaggttgtaaagtagtcttattgattagaaaaaggagacttttaaatgcaaaaattatctgccttaacagccccaatgaccttaagcaacggtgttaccattccaggattagggtatgggacatatcaaacaccaaatgaagaaacgaaaaaagcggtcttagaagctttatcagttggctatcggcatattgatacagctgccgtttacggcaacgaacaaggtgttggtgccgctttgaaagaaagtgatatcgcgcgtgaagacatctttgtgacaagtaagctatggaatacagaacggggctatgatgctacgaaagctgcctttgcacaaacaattgcaacgttaggtgttgactatttagatttatatttaattcattggccagctaacactaaacaatttgaagccaaagatgctgaattaaatgctgaaacttggcgtgcaatggaagatctatataacgaagggaagatccgtgcaattggtgtgtcgaactttatgccccatcatttagatgcactcatgaaaaccgccgttatcaaaccaatggttgatcaaatcgaagtccatccgggctggccacaagcagaagctgtgcgttataatcaagcgcatgacatcttagtcgaagcttgggcaccacttggtgaagccagtgcgctttcgaatgaaacgattgcaacaattgcgacgaggcacggcaaaacggcagcgcaagtttgccttcgttggggggattcaacaaggtgtgttaccattacctaaatcaactcatcaagaacgaatggcgcaaaataccgatatcttcgattttgaattaacagatagtgaaatgacccaaattagtgctttggaaaacttaggcggtcaatgcatggtgccagatgacgttgatttttaagcaagtataaggaaggttaatatggcattatcaattggcgtagtcgcccaacaatatgatttgagtattccgacactacggtattatgaagaacaaggattattaccgtttattaaacgcagtccggctggtcggcgtgaattccggcaagctgatttagactgtttatgtgatattgaatgtttgaaaaaaaagggtatgcagttaaaagatattaagcaatacatcgattggcgaactgcaggtgatgaaactttggaccaacgcttggcgttgattcaacaacggcggcaaatgttggctaacgagattgaatcactgcaagtagaattgacgaagctagatcataaagaatggtattacacaaaggcacttgaagccggaacagaatccatttttacagctgactgtgatacagaatatgaacgtgcgcatcaataatcgaaaaaagaggcaacctgataggttgcctctttttgtgtgtttaaacggttaatgttttttgcataatcagatcacgttgtgcgtcgcttccgagttggaagatgtgatcaccaacttggctgaagccgaggtttttgtaaaagttaagtgcagcagtgttgtgttcccacacgccgagccatacgttagttttatggaattgttgcgccacggctagtgcatggttaattagttgtgttcccaaaccaagtcgcttaaaggactgtcgaatatagatacgttcaatctccagtgaatccggggcagctttttcagtttgtgcgccatcaatgttgagctttaaataaccagcgacttcgccatcttgataaataaaatagaagaacgaatcgggattctcgagctcgctagttaatcggtctgtattataagcttcttctaagtagttagcgagatcttctgctgcattttcagcgccaaaagttgctgtgaaagtttcacggctgatggattgtaagtcaggtagttggtttaatgtgacagcttgaattggcattgtgatgcctcctttgttgtaatagtgtcggacgtgtccctttttgacaaaatcccagtttgcggcaacgttggcactaactttgtttaggagtgcttcaagattatgggcctcgtcggtcgtcagtccagtcagtgccatttgatttgaataatcgttttcagctttgatggcgggatagacggctcgaccggcctcggtgagatagagatgtttgatcttatgattggttttgtcagggtgtcgttcaactaaaccatgcttaattaattgttgaacggcgcgcgtgactgttgcgcggtcgacttttaataattcacctagacgttcttgaatgatcccaggctgttctgcaatgcggactaagtaaaggtattgcccgcgggttaagtcatattgttggaattcaatattagcaatggattccaacgcgcgggctataaccccgattgggcggagaatttcagtcatgatggcatacctcatttcgataaaaatagtataaaatatttttgttgcatttacaacaaaaaataaagtttcgattcgttaagtacgccaaaaataagaatataattaattctcgatgtggaatatgcgctttcattttaaaattaatcttaaaaacagattaaggtgatttttttatgctcagttactaaataccattttgaaacgcgctcgtcgaagcaatgccttatgtttagctacatcagtcaaaccactgactgcatcagttattcgcctgcttaggctaatccgcacgcactacccgcttagtcgaccacttttcttaaacttgttgtttagttgggcgaattaagacttcactgaccactacatgttttggttggtcaatcgcatataagactgcgttggcaatgtcttctggattgagggccaacgctgattcttctggtgcatccattaattgcttaaccccttcgaaaacagcagggttgccaatcgtattcaccaattctgttttaacagcccctggtgaaacaattgttgaacgaatgccgttatctttttcttcttggcgtaagccttccataatagcgcgcactgcatatttagtcccgttataaacggcagaagctggataaaccacatgtccggcaaccgaatcagttgaaataatcaaaccatcttgttgggcttgcatcgttggtaagaccgcaccgatcccgtttaaaacgcccatgatgttgatatcaagcatcttttgccattgatcataatcgcgttcgctcaggtttccttgtggcatgacgccggcattgttgtataaaacatctacgcgaccgaaatgatcaagcgccaattggactaagctcgccatttgatcccgattagtcacatccgttgcttgataaatcgcatttgcaccgatttctgatgctaaagcttgtaaacgatcttcacgacgagctgctaaaacaaccttagcccctttgcttactaataatttggcagttgctgccccaatccttgatgaggcacctgtaatgatcacgactttattttgaattgacatgttaaaactccttttctaatttgatttgacgcatgactttcgctggcgttccggcaacaatcatattgtctggtacatctttggtgaccgtggcgttagcagcgacaatcgcattctcaccgaccgtcacccccggtaaaatcgttgcgccggcaccaatccatgcgttctgtttgatatgcactggtttaacgaataaaccgcgccggtcaggcttttaaagaagccctcaccaaccagaccaataaaaagccgccacgctaagcttgacggcttttttaacccacttgatttgcgaaattgcttaatttatgtccgttactttcccaaaataggggctctataatgcatattgaatcttatctggaggtcttttgatgatggaaaaaactgaaaaaatcgcaattttagaaaaactggtctcaattgatacaacagaccaagcagaaggtgtgattgccgactacttagccgatctattcgcacaacatggtatccatactgaaaaagtggcttctaaaccaggccgcgaaaacttagtggcctatctaggcgaagcaaccgacaaagtcctcggtgtcactggtcatatggacgtcgtcagcatcggtgacgcagcaaatggacgagtgatcccttcactctaaccgctcgcgatggtaaactcttcggtcgaggcgcaatcgacatgaagtctggtctggctgcgcttgtgattgcaatgatcgaattacacgatgaacatgttcctctaaacggccaaatcaaactactcgcaaccgtcgatgaagaaaagaacgaaactggtgcgcaaactttaaccgctcaaggctatgccgatgatttaacagccttattagttgccgaaccatctggcgttgataaacaagccttggcaaataaccccgataaattccccacagaaatggcccaaaaactccttgcggctaatcaaaccaatgaacaacatttcttaattttcgcccataacggttcccttgattttaaagtgacggcaactggtaaaaccgcgcacagttcaatgcccgcactcggtattaacgcaattgatcatttgcttgcctactacaatcggcaaaaacaatacttcgatcagaaacatcctattgatgatgtcctcggcgatatcgtgcctgtcacaaccttaatcaacggtggtgaacaaattaattcggtccccggtcacacagaacttacttgtcgggttcgtacaacccccgccttaactggcgaccaagtgattgctgacctcaataccatcattgcggaactcaatcaacaggtagacatgaatctggaattgaccgtcattaataaccaaccacccgttaagagcaatccacaagcaccattcattcaagctgttcaaaaaatcggggcacaaaagttatcccaagcttatccactgatgcacgttgctggcggtaccgacgccgcccaccttgctaagcacaatcctgacttacctgtggcagttgtcggccccggcaatgatactagccacatgattgacgaatatgttgatgaagaaatgtacctcaaacacatcgacttctttaaagccgttatgctggattacttaaaataacaacacaaaaaaacatcacctaatatatgccctacttaagagcttatcggatgatgttattatttaatcgtgatacgccttcaagctatttttaagctaaggcagtattgatttcttgtgctaatgtttctttccgttgtaacccaaccatttgttgcactaattggccatctttcatgaccaacaaggttggaattgattggatgccgaattcagccgccaagttttggttgtgatcaacgtcaactttggcgattttagctttacccgcgtaatcgtcggctagttcttcgacaattgggccttgcatccgacatggtgggcaccatgttgcccagaaatcgactaatgtgaccccttcttgaacttcatctttaaagtttgcttcagttagaatttgtgttgccattgcgatcacctttcttttcaagaaaatcattcaacgatttcattgaattactcataatataccaccattgggacgtgccgtcaaaaaggacgcttcatcttattccgtttcggtcataactcgcgaccattcccacactgattgattaaacgttgccactttaaacccagcagcttgtagttgttgactggcaacattggcgtaagcacatagacgaccacgacaataaaccaccacttctttatccttggggagctcagctaatcgttgatccaactgatcatatggcacattgcgtgcccctggtaagtgttgacttgcaaactcatctgcgggacgcaaatcaatcaaacacacatcgtctgccattaatttcgttttcaatgcgtcaccagttaacgcttcgggggcacctgtttcttgcgcgagtgttttttccaaaatcgtcatctctggcaaagtttcttcgcagacatcaaccaagagggttaccaattgtttgacccgttctgaatttaaacgataagtaacaaaattcttctcgcgttcaatcgccactaagtttgtttgtttcaaaatttgcaggttccgtgaaacggtagcgacacttaagccgactgtactggctaagacttccaccgttttggggccttgcgcaagaatgttcaacagttgtagacgcgtcacgttccctaacgacttcccgactttgaccacctgctcataaaccgcatcccggtattctgtaatgcgttcatccactttcatcgcctcccaacaatcaacgcctttattgaatagaatcaatttaacatttctagacaagtgggtcaactaaacaagctaggcaattaaagtaagacacctcagttaattgctttcttcaaatcaacggtgccctgattagcttctttatctgtaatttcaaaaattagtataaattgccactcttgaccgactttatcagttacgttcatttcagtatatttccctatctgaattcctaattaaatgaactaatgtctaaaataaaaaaagaaccaccactcaagctatgtactagggtcctgtcaagttgccggatgaaataatataaaatatccaaaaaaataaccgtctaaactttgacgagtcacggttattttttaccaaaaacttgccaccgtcttaagcggactgtggagaagagtcgtgttgtcgcacggctctttttctatgctttcattataacaccgacttttaaaatttgcactagtcgtcaattcaaacaagcaaaaaagcccccgctaaatcaggcttggcgggggctttttcattgattatttatcttcagtgacttcttcttgaacagtttcaacagcggcggctgcttcgtctttggcttggccaaatgcactcttgccgtcgatcacgatatcgtcgaaatcttcttggctagcttcaaggctgccgccaaattgtgatttcaagtctgctgttttttcatcaaattgtgcttttgcttgttctttgatatcagacgcattgtcttgccaatcacttgcataatcatggacgcgattcatgtgtagctttgcgtcgtcttttaagtctgctgctgtttcacttgctaaatagtagtagtcttgtgcgcgatccattaaatcatcacctaagtccactaattttgattgtaattccttacccgtcttaggagttaacattaatgttgcaccaatggctgctgcgccaccgactaatacacctaatagaaaatgtcctttttttgccatgagaattactccttatcctttgtttgacgtcgattttggtaaaatcttaatgcacttgcgccaaccttcgaagcgaccgttgccttagcggttgtccgcccaacgttggtaacatgttccgttaaattgcgacttgccgtattcaaacttgaaacgctctcgccaagttcgccagccgctctgaaaacaggatccaagtcagcgactttcccgttcacatcgtctagcaatacgttggctttgctgagtaaaccttctacttctttagataaaatatcaacattctcagtaacaaccgtgacactcttgttggcttccgttactgttttagaaacatccgttaatacttttgtgacttttaatagcatcactattagaaaaacaactaggaccgcaaaagcccctgcggcgattagcgccgcaatttgaccacccgtcattgatttgttcctcctacttcgttatctattacattgtctcttaaagactagaatagcattatttcccttaaccttcaattatcttcactatattaggtgccattttttctgacatttgctaaactaaagacatgctacaaaaaaggagtttcacgcatgttcacacgtttattagcggccgcaccaactccggtcgaatctgttcagaaacagaccaatatttttatgcgctacatcacttcaattgactgggataaattactcagcaccctcgttgctggattgtttcaaattatcctactctccgctttattctacctcatcaatcgcttaggtaaatacatcattaagcgtagcttcagaaaataccgcaaaactgatggtttctcaagtaaccgcatgaacaccatttatactttgatggtcaacgctttttcatacctcgtgattttcttctatctctatgcgctactcagcgttctcggcgttcctgttggtaccttgattgccggcgctgggatcttcagtttagccattgggttaggcgcacaaggtttcgtcaacgacatcgttaccggttttttcatcctcgcagaacaacaattcgatgtgggtgatatggttaaaattggtacggtagaaggcaccgtcaacgcgattggcttacgaaccacacaagttcaaagttacgatggcaccttaaatttcattcctaaccgcaatatctcgatcgtcagcaacctatcccgcaatgatatgcgtgttctgattaacattcgcatcttacccgacaccgacttacaactgttagcggcaaccgtcaatgaagtcaatgtgcaactggtgcccaaacatcctgaaatacaagatggccctacgattctcggggtaaccaccctcgcagatggtgtccttgcttaccagattgttatgcacaccactaacggcgaacaagctgccactaaccgtactttcttacaggcttacttgcaagccttgaatgaagctggtgtcccattaccttcaacacccgttacaattcccaccaaataaaagtcccctcatataaaaaggagaaccgcttatgccacttattaacgcactcaaaggcgccctaatcggcgtcgcactcgtaatacctggtctatccggcagcattttcgccgttatcgttggtctatacgaaccgcttctggcggctatcgcgcaattcaaaaaagattggcgccaagcaattggctttttatggccaatcgggattggcgctgggatcggcgtcttactctccaccaaaatcattctttggttatgcaccgcttatccactagcggcatacagtttcttcatcggtcttgtcgtcggcagtctcccattcatctggcgtagactcgccggactcaactggcaaaaagtgttaatcgccatcgtctgtggcgcaattatgctactactcacccagattggtggtcaccaatctgaatccgacatcgctatcaaacaactcactaccctccaagactttggcacgttactatttgccggcttcttctcagtatcactcatgctcatcccaggcgtctctgggtcaatcatgctcatgattgtgaagcaatatggcactgtttatcacgctgtcagtcaactactcgacttaatggtctacctcgtcacaggacgcttgacacaagccacagaagcgttcaaaagcgtcgcgctcctcttaccgttcatcattggggccgtcatcggaactgtgattgttgctaaattaatgcactacctattagcacacttcgtcgaatacgtttacgccggtgtgctcggcgttgtcattgccgccatctggattcttgcccaaaccggcgtcgcaccagcctggccagccctaacaaccgccacagcactactaggacccatcgcactcatcatcgctatgatcatcctaggcacaatcgcaacaatctacttcgacaaagcatagagtgctgttaaagcgatttgcctctgagcattaattaaaaatgagcctcaatctcgtcttttgagattaaggctcattttagattaagcggaaggtgttgcaattaaaaagcacgtttccacaaaaaaactatccacacccttcccaatcaggttgtggatagtttttatttattatagtgctttaatcgctctaagatgttcaatggattgaagtcaatatttgagacagattttaagagacattcagaaccgcgtttaccttccacagctcaaataaatcattaatcgcgataataacttatttgaaccctggaaagcattaaatcaggcggccatttggctcgtaagtgttgcaatttcaacttgtaagggggtctggtagcccagtgaactatgaattctcttcctattgtagaaagcatgcacatattcaaaaaggacggcaatcacaatatggtattaagacctattactgccatgcttatgcttcagctgaaccgttgcccattgtcaccgcagtaccggcaaattggaacattgggatgtcatttttctcatcgccaatcgccatgatttcatccggcgcgaatccaagtttattcgcgaggtattgcactgctttgcctttattaacatcagcgtgcatcacttctaaaaagaggtcagccgcacgaacaacataattatcagttccaaattgcgcgcgtacctgtggttcatgtgcatctaactgttcgctggcccctgtaaagaccgctttgaccatctgcgtggccgcgtcgatttcattcggtttgcgaatatgaataccagcttcgttttcccaagcttgcaccaccgtcattggtgcaacattcacattactcgtataaaccacactattttgatcgagcacattatacggtaagcccgttgcttgcgagtagtcgtcaatcgcttggtaggtttctcggctgatgccagcttctttcaagattttaccagacgccgtttcgataatactgccgttaaacgtaatcacgtattgattatcaccggcaatccctagttgatttaaaaagggcaccacgccagctaatgggcgtccggaacacaaaacgactttcacaccctgttccagggccttagcaacttgttgtttcgtactggctagcagttggtgctgtgaactcaataatgtatcatcaatatcaatcgcgactaatttaatcgtcatctcaaaacccctcaaattgaatttaacttgcacaacgttcgactacatatgtttggcaattgtttcattaaccgctgctttttgatcttcaatcaatgcaacccgactttcgatgactttaatgtccatcgtaatttcccgggttaagcctggggtgttgagcttaggttcaaagaaggctttgaactctgccaaccgttctggggtcttaaagattgcggcaatcgaggtgatatacgttgtaaattccatatcaccgccgactgtctcttctagccattgccaatcgttgcgaatccaatcccaggttgcttgttggctcttgtcgttggcgagtaagccgcggaaccaagcccgcaaatcttgtggtttgatggtgctggcatcttcaaattttccaattaaggtcgcaattaattcaggatcagtcgtgcgcgttaaggccgcagtcaaatcattcttatagctcgcatcactcgtttggcgataagctgctaagagctggtcataaagcgcggcattcccgaagttttggacctcattcatcaagaccagtacccgaattgcggctggtaaggtgatcaatttttcttggttcgcttggaataaagtatgggctgcatcaatggctgcttggtttttagcgtataaggctgcgcttaaaacagttgggcgcattaactgatcgtcattgctatcagtcggttgaaccatccaacctaagcgcgcaacttgcgctttactcaattggtcaaagaatcgacgcaggtgttgttcactttcttctcctggtgtaacgaacttcttcaagttgccagcaaccgtgtaaagggcatctgccacgacatttgaatcactcttggcaaaaggtgctaaaacaggcacaacatctgcgtacgaaatttgacgtccttcagctaataagcgtaagtcttgcagtagttgcagttgtccaattggtgccatgtcagcactactatttaaaatatcatctaataatgtttgatcgtaatgaacaatgaaatgcgattcgttccccacgtttaagcggaatggttgcccattgtcggcgcgtaattgagcataatcaccgagtaccaattcacggtcaatcatcaataatggggctgccgcatagttgctcttcaatggaatctgccattgacgcccaacttcttgaccctcaccgataaagaattgttgttggttaagcgttaattgtccgtcaacgactttggccgttaccactggataacctggttgttcgagccatgaacgcataatggccccaacatctaagttagcggctttccccagtgctgcccacaagtcagcgccagtcgcatttccgaattgatgtgctgcaaaataagctttcaaaccagcgcgtagagcatcgtcaccgattaaagcgcgaaccatcacgagcatccgggcgcctttggcatacacgattgcgccatcaaataacgcatcgatttcggctggattattgacttgcacatgcaccgattggaccccatcagtcgcgtcacgttgtaaggctgccgctgcttccgaggtttggaaactttcccaaatatgccagtccggctgcaacgcatcgattgcgacgtattccatcatattggcaaaactttcgttcaaccaaagatcgtcccaccattgcatcgttactaaatcaccaaaccattggtgtgctaattcatgcgcaatcacagtcgcaacgcggtgtttcgtatccaaggcagtattatcaggatcgagtaataaataagcttcccgataagtgactaagccccagttttccatcgcgccggccgaaaagtctggcaatgccaactgccatgaatggggtaatggatagggtgtttggtagaagtcttcaaagaattcgattgaccgtttagcaatgtccaatgcaaaatcgagttcgtttgcttgatgtgccttagtagcaaagacgccaacttgcacgccgctctccgttttagtttgaaccccttgcaattcaccaaaagcaaaggccacaaggtacgttgacatccggaccgttgtttcaaagtggtgaacgccatcgatgacttctttttcaggcatgttgctcagaatcgtttcgccttcgtgctcatcgaatttaaccgctaaatcaaaagtcgctttggcttctggttcatcaatacatgggaaagcttgccgcgcaaaattggtttcaaattgcgtgccgattaattctttttgcaccccatcgacttgataataagaaggatagatgcccatcattgaatccgttaaagcggcagtataggcaattaccaaagtcacttcgccaggttggccgacttcgactttcaaggcatttgcgtcattatcaactgtaaacggcacactcttacctgcagccgtcactgtttcaatcactaaaccgttctgatgaattaaaacaagtgcttctttagcagtccccgtaattgtcgtccgaccactaaattgtttttgagcccgattaatatctagaaaaacttgataatgttccggttgaaagctttgataaaaacgcatcaattctgccatattatgatctccaatttcatttagaatactgtcattatacgacttttagcctaaaaaagctgttgtcatccatttcatattttgattatcagcttggttgcacttaattaaaaaaatcaccttaaactttgttctttgaaaactggataataagtaatatattagttttaaaagccgagaaaacattgcgttttaaagagttttttaatagaaatatgaattagttcatatcgctaaactcaaataataaccctttaccgtaggtaaagttaggttaagttataaagggcgcacggtggatgccttggcactaggagccgatgaaggacggtactaacaccgatatgcttcggggagctgtaagtaagctttgatccggagatttccgaatgggggaacccaatacctttagtcgggtattatcattaagtgaatacatagcttaatgaaggtagacgcggggaactgaaacatctaagtacctgcaggaagagaaagaaaaatcgattccctaagtagcggcgagcgaacggggaagagcccaaaccaagaagcttgcttcttggggttgtaggacagaacattggagttaccaagttaagttgtaatcgaatcagctgggaagctgagtcaaagagtgtgataaccacgtagattaaacaacttaacctccgttctggatcctgagtacggcggaacacgtgaaattccgtcggaatccgggaggaccatctcccaaggctaaatactccctagtgaccgatagtgaaccagtaccgtgagggaaaggtgaaaagcaccccggaaggggagtgaaatagatcctgaaaccgtgtgcctacaattagtcaaagctcgttaatgagtgatggcgtgccttttgtagaatgaaccggcgagttacgtttatatgcgaggttaaagtgaaaagctggagccgtagcgaaagcgagtctgaaatgggcgagtgagtatatagatgtagacccgaaaccaagtgacctacccatgtccaggttgaaggtgtggtaaaacacactggaggaccgaacccacgtcagttgaaaatggcggggatgaggtgtgggtagcggtgaaattccaatcgaacttggagatagctggttctctccgaaatagctttagggctagcctcggaatattggatcatggaggtagagcactgtttggactaggggcccgtcatgggttactgaattcagataaactccgaataccattgatttagttccgggagtcagactgcgagtgataagatccgtagtcgaaagggaaacagcccagatcaccagttaaggtcccaaaatttatgttaagtggaaaaggatgtggcggtgcacagacaactaggatgttggctcagaagcagccaccatttaaagagtgcgtaatagctcactagtcgagtgccgctgcgccgaaaatgtaccggggctaaacataataccgaaactgtgggtggacacgtaagtgtccgcggtaggagagcgttctaagggcgatgaagctagatcgtaaggactagtggagcgcttagaagtgagaatgccggcatgagtagcgaaagatcagtgagaatctgatccaccgtatgactaaggtttcctggggaaggctcgtcctcccagggttagtcgggacctaaggcgaggccgaaaggcgtagtcgatggccaacaggttgagattcctgtactagtttattttgtttgaacgatggagggacgcaggaagctaaggaatgcacacgactggaaatgtgtgtctaagcaacaagtcttgagttgagtgaaatgcttgattctttaaggacaagttgtgatggggagcgaaattaagtagcgaagttcctgatgttacactgccaagaaaagcttctagtgagaaataaactacccgtaccgtaaaccgacacaggtggtcgaggagaatatcctaaggtgagcgagtgaactctcgttaaggaactcggcaaaatgaccccgtaacttcgggagaaggggtgctgaccgtcaggtcagccgcagtgaataggcccaaacaactgtttatcaaaaacacaggtctctgcaaaatcgaaagatgacgtataggggctgacgcctgcccggtgctggaaggttaagaggatgagttagcgtaagcgaagcccagaattgaagccccagtaaacggcggccgtaactataacggtcctaaggtagcgaaattccttgtcgggtaagttccgacccgcacgaaaggcgtaatgatttgggcactgtctcaacgagagactcggtgaaattataatacccgtgaagatgcgggttacccgcgacaggacggaaagaccccatggagctttactgtagcttgatattgagtgtttgtacagtttgtacaggataggtaggagccgtagaaatcggaacgctagtttcgatggaggcgttggtgggatactaccctaactgtatgaccactctaacccgcgccacttagcgtggcgggagacagtgtcaggtgggcagtttgactggggcggtcgcctcctaaagtgtaacggaggcgctcaaaggttctctcagaatggttggaaatcattcgtagagtgtaaaggtataagagagcttgactgtgagattgacaaatcgagcagggacgaaagtcggacttagtgatccggtggttccgtatggaagggccatcgctcaacggataaaagctaccctggggataacaggcttatctcccccaagagtccacatcgacggggaggtttggcacctcgatgtcggctcatcgcatcctggggctgtagtcggtcccaagggttgggctgttcgcccattaaagcggtacgcgagctgggttcagaacgtcgtgagacagttcggtccctatccgtcgcgggcgcaggaaatttgagaggagctgtccttagtacgagaggaccgggatggacatacctctggtgtaccagttgtgccgccaggcgcatcgctgggtagctatgtatggacgggataaacgctgaaagcatctaagtgtgaagcccccctcgagatgagatttcccattcctttatggaagtaagacccctgaaagatgatcaggtagataggctaggagtggaagtacagcgatgtatggagcggactagtactaatcggtcgaggacttaaccaaaggtgcaatgttaggcttttgaaatgaaatattacttattatgcagttttgagagaacgaagttcttctcagtgcgcaagcacaaaatagtgtggtggcgatagcaagaaggatacacctgttcccatgtcgaacacagaagttaagcttcttagcgccgatagtagttggtgggaaactacctgcgaggataggacgttgccgcgctactaccaatatactaattcctaaaagagccataatctctcttagtctttttcgatcaatccattttaatcttattctgctctctgtgttcattacctattccctactaactcttttttctagttgctgtttaattccaaaaaggatcaacattaaagctgtcacgcttgttattaagaaaccttctttaataccttttggaatatatcttagttttatactgctctttcctgattcaactggtacttgcataaatccatgattatcctcaagtaacacggatttcccgttcacagttgctttccaacttttatcaaacggaatcgaaaaaaagacaggctctttatgtttagcattcacttgtaattcaatactattctcactcttttttataacctttggagcttcttttcgtaacttttcaatattctccgttagggcatctccattaagtagtataaatttaggagattctgcgatatttacatttccttttaagcgcattttaacaaatgcattacttttgtgattggaactcttataaagactcaatacaccttcattatgaaaattaggataattatttcgtataatctggttagttttaaaatctaatttaccataagaattaacaccatcaattacagctatcttagtcagaagttctgaattagctggcatatcaatccgatactcaatataagcattcttaccatatgggctcaactgaatgccattatttttttgctttatttttacgttatgaacagtaaaatttggattatctattgttcgaatgattgcacttcttttatttttattaaaaaagagaagctgccgctgtagttcatttccttcgagtggttgattaatggttagattgtcattaataattgcgatcggtaaagcatttttattctgatacacttcatagtttccactattgaacaccttctggtatccaatagaagtcatagaatcattcatcaatgctattctatattttagccctaataaactatccacaatcgtatttccttcttgatatgccagtgatttattccccaaagtagtactatatccaaattgagataacgttgtagctaattgctgatatccaaaagtgttaaaccaactaaacccgttaaaattattgtacattccttggtttagcattgcatttggcgttactacagttcgatagaatgttcggtcctgctttaaataagataaagcagtctttaaattttgactgtcattttctttccaatttttttcggtagcgacgtatccgggtaagctatccaactgactaataacaaaatgcatattttgaatactatctgtcataataagggctaacgttaaccacttgattatatttattcctatatttttatagaaaatatagccaatcaatatcattaaagtaagcaaccctaacattacactattgataattagtatcccgttatctattacctgctttttatacaacgttaacaatattatgctgcataatagcaccgcatataccaatggttttagtacattttctaagccgatattaatcacaaaaccagtgattaatatcatcattaaactgattaaaaaactaaatctgaatccataccctgtgggttgttgaaatccgtgccacattacatatggatattcataaatataactaattaagaaacaaatctctaaagcgctcactatcacttttattcttatttttattttgggtataaaataaaaagctattacagcaactaacatcaggataccgcaatatatattagcgccatcaaataattgcgtattatggctaaacagatcagacaatgctatccagatactctgcttgcgttgcaagaatccaacttgcaagggtattttgggtcccgatttcaatgcataattaattggtaaaattagccacgctgataacccaaaactaagtattaccgaaattagaaacttaatgccagatttccatttcactctattttgaaggactattaattctactaagaaatatataaaaataccgatacctgccatatatgccatatagaaattagatatgaataacagtgttaaagtgcctgttagtagccatatcttacctttattgatcaaatgatcaacacccattaacgcaattggtattaatattatgctatcaagccacattacattaaatgcataaataatattaaatgacatcaaagcatacgctatggacaatcctaagcgataaacatagtctaattttattcttttattgataaacaaataaaatgtaatacctgaaagaacgattttagatatgattagaattgtcataaaaagcataatttgactatccttaaaaaggacaacgagaaaacttagtgggctcattaagtaataacccattattgtaaagaaactgcctcctaatcccaatttaaaactataaagaagtgttccgttatgtactagttgctgtcttaagtatttgtaaaagatactatactgcgtataactatctgctcgtatccataacttattaccaaacggatatagcccctcgtaggcagacaatcctacaagaatagctaataatattattattaataacattacactcaaaatagattttctatttttactcatgatatatatatatccccctcgggctttctttaatataacaattaacatgataccccaatattgccattaatagtccactatcttttaataaatgaaatataaacgattaatcattattaagaaggtggagcagatgaaagacgccccaagacatacaatcatattagggatagtggccacggtcattgcgtttatttgtggcatgttagttttaaagacgattttgaatttcaatttatggcttgcgattctaatcagtgcagtactaggcttatatgtcgggtttaatgcattctatagtacgtatttagcagaaatgatcaaaattgaagtggctaatcaaggattaacaagccaagacttagcgacaatgatgcatggtagggctaaggattatccaattgtccgcggtgaattgcgtctaatcatttctcggcgcaaacgcgcacagctgttagcgaagttgcgtgcacgggttagctaaggcttttgcatgaacgattgttctatgttaggataggactaacttattgaagggtgcgattacatgttaattgaacgaccattaattatgaagcttcgctctgtatatttgaagatgacgcatcgtgcagagcctaatattgattaaaagtcatctataggacattactggatttaacgactggtgacagtggtttatttgggtagtgactatggatggagtggtcgatagtcaatgattgtaatcatgacaggggtagcggatgctgcccctgttttttatttggaaagaaagtaggaataaaacaatgagtattttaaaagtcgaaggcctaacacaacagtttttagataaacaactttatgacgacgccgggtttcaagtgaataaaggcgaacatatggggattaccggccaaaacggggtgggtaagagtacgttaatcaatatcctcacgggcgtcattcttccggatgaaggaaaagtgacgtggcaaaagaatttgaagattggttatctcgatcagtatgcgaagttagcaccaggattatcgatctttgaatttttgaagacggcttttgcggatttatataagaaagaaaaattaatgagtcaatattatgcggactatgcagagagccttgatgaccaattgctcgaaaaagcgggtgcgattcaagaactattagaggcaaaaagcttctatgatattgatacacgcgttatgcaagtcgccactggcttggggattgatgcattagggatggatcatgatgtatcacaactaagtggggggcaacgttcgaagattattttagcgaaactactattagaagaacccgatatgttattactggatgaaccaacgaactatttggacacgaaccacattgattggctgagtgattatctcaatcatttcgaaggcgcctttatcacaatctcccatgattatgactttttggaacgggtgacaacctgtatcgccgatatcgaattcggtaagattacgaagtataccggcacactacaacaagccttccggcaaaaggaagagaataaggctagttatttaaaggcctatgagaaccaacaaaagaagattgaaaaaacgaaagcttatatccgcaagtataaagcgggctcccgttcgacaattgccaagagtcgtgagaaacaattggcacatatggatattttgacgccaccaagtaatcgcgtgaaggctaacttccgctttccatatcatgcaacggccagtcagattctattgacgactaatgatttggagattggttacgatcgcgcgttactaccagcgttgaacttttcaattggtcgtgatcagaaggtggtcttgaaaggttttaatgggattgggaaatcaacgttgattaaaacgatcattaaagaaattccagcaatcgatggggactttgagattgccagtacggtgaagtttggttactttaaacaagacttgaagtggccgaataatatggtaacgccattacagtatctacaaggcgaataccctgatcagaaacaaaaggaactacgccaagttttatcgcggactggtttaactgccgaagaagcgatgaagcctttgaaacaacttagtggtggcgaacaatcgaaggtgaagattgccgaactactattaacatcaagcaactttcttctattagatgaaccaacgaaccatttagatgatgatacgaagaatgcactacgaaaagcaatccaagccttcgagggtggcgtactccttgttactcatgaagaagacttctatcaaggtgactggattgataagattttggatgttgaatcactcattaaacaatagggataccgtagagctttgaagggttattggtaacgatgaaacgttgctggtaacttttcaaagcttttttaataaaaagcttgaccgcgcctgttaatcttggtaatatataaaagttgtctcgacgagggacgtatggttgatgactcagcgatacgaaataaaaaagattttaaaaaacgcttgttatttaaaccttatcgtgataatatattatatgttgcttacggagctataacttctaagtaataattaattaaaaatagttgttgacagacgataagttgtgtgatataattaaaaagctgtttcaatacagtagatctttgaaaactgaacaaagtttcgacaaaccaaatgtgtaaattgataaaatttcaaataaatatatttaataatgtgaacctgatgtgttattgtattggttgcagagcaattgattgtccgtgatgaagttggcgtctattaaaatcgaacaacaataaggactgggtgaagactacatggctttttcagattacataacaaggatactcatctacacaattgtgtcgtatccaatcgtcgggggattatctttcattgtttccagtctttattactggttatttttagaacgcaaagatatgccacgttacttagaaaaagggacgccattcattactattttagtgcctgcgcataatgaagaagcttcgattgaatcgacaattgaacaccttgaagagtgaatgaattatccaaccaatcagtatgaagtgattgtggtcaacgatggttcaaccgatcaaacaggtgctattttgaatcgattgcagactcggtatggtgagaagcgcttacgtgtgattacgatcattaataatcgtgggaaagccgctgggtttaatattgcactcggattttcaaaaggccaatttttattatcgaatgatgccgattctaaaccggaagtggatgcattgtggaaatacatgcactatttcgaacgagaaggtggcgatcgattaggggccattactggcaatatgttattaatcaacaaaacatcgttggtagctgaagcacaacaaaatgaattgaactcgatcatcggactgattaaacgttcgcagctttcatacggtggtctatttgcattttctggtgctaataccatgtatcgtaaggcggcggtcttagatgttgggggttggcaagcggaacaaccaactgaggatatcgctatttcttgggatatgcaggtgcatggttggcaagcgtatttcgcaccacatattcgcttttttatggatgtgcctgaaacactgcctgagttggtcaaacaacggagacggtggactgccggtgggattcatgtgttgttaacgaaatcgatggatgtctttagacacccgattaaacatttggcaatggtacccattattgttgattacagtttaagtgttatttggtcgctatttttctggttaagtatgattgcgtttgttggtgttcaggtgttgtgcttggtccaaggggattggtcacgtctaattaccaatttctgctttgcagcgatttttatttcaattgagattgtggtgggcttaattcagttgattatggcgtcttactttaatgaccgtggacgatcattaaagtatattgcgtttgcgccatggtatatcctaatctattggatggtgaatactttcaccgtggcggttgaaatcggaccaacgattattcagattcttaaaggcgaggatgctggcgtttggaagtcaccaaaacgttcggtagaggtcgtcgctaagacaaaagaggagggcaatcaagatgactaaaccagactatatcacgcatcaagtgagtgaggcatcgttgacgaatgattggttttttactaagaaaaagacgggcaaaaaaatctggcaggggattctgattgccattggatggttaatgtgtctggtaccgatgaccattacgggggtcttatatactgtcaaaagtgttccgctaccagttgacttaatggcctttagaaggatattattacagactaattattactttttattatacgttgccgtatttgcagtcttctttttagggctttttctattgaataaattacgaaaatatcgtttgaaaaaaggtttgctgcggatgtatgatccgacgcgattgagacagcgcatcgatctagcagaggatatgtacttacaaaagtatggtccattagacatgcggcacgaacaaccacagattatcattccagattacacggatgtgggcacctatgaagtacggcaaagatttgattattttgaggaggaagaagatgctttctaaaaaagatcaagcaattgtcgatgacatgattgttcgtgagcgaaatatgaaaaaccgccaacgcgtgattggggttattatgcataagcgacggttgtttaagcaacgtttagtgatgtacgctgctattttaacaacggctggtttttgggtgttatacacttcttttgcacgatacggtaatttatccgtcatcaatattattcaagtgaatgttttgatgaccgtgattttactattcttcaatttttatatttggcagaaattggtgcgctataatccaatgcaattgtttatcaaacctcccaaaaaaaatatttttaatgccacaatacctatttattgcgcatcatccttaaacttattatagtaatttgctcctgggaatacccagttagcacgaccgaatatcttgattgtcgctggaataataatcagacgaaccaagaaggcatcaaatagaaccccactggctaatgaaataccaattgacttaatcgttggatcttcaaccaaggcaaaacttccaaagacagcaatcataatcaaagcggctgtaataatgactggaccactctcttgcaatcctgttttaacagcccgatttgtatctccagtggcaatgtatgtctccctaatccgtgagaccatgaacacttcgtaatccatcgccagaccgaagacaattccaatcataatgactggcaaaaatgcaataattggtgatccttcactaatatggaaaacaccatcttgcataatcaatgtcgtcaatcctaatggtgcaatcaatgataaatgctcttatactaaaaaaatggactatttttattcagtccgtaaaatgaaagtataggagtatttttatgtcaattcgttattcacaagattttaaagattcactggatcatcagctttgacgattaattgttcttgagctgtttcttttaaagtttttgctgaattcgttatactgcaattgtaagcgtatttaaaaaaatagttgaaatgggagggatttatatgttggaaagaaatttaacagttattggaagttacagtacgagagaagaagctttatccgtgatcgaacaactgcaaagagaaggctatagccgtgatgatatcattatttacaccaacaaagatgcagctacaaattttggttttgctggactgtcaggaatcgatgttaaaaccggcgtaaatggcgtcgaaacgactcacgaagatcgctcactatgggaaaaaatcaaagatgcattttctgctgatacgtacgaatacgattcaagtttaaatgaagaagctgaccatgcaaacaacgacccgctttaccaatatagagatgatatctcagctggaaaaattattatcaccgtcaataattataaaaacgacccaacacaagcaactgaaaatgttacaggcagacatgcagctggtgacactagcacaaataatttacatgcatcagatgctgcacgtgcaactgatctagatactgatactgatagtatccagcttaaagaagaacaattggatatcaataagcatgatgtgacgacgggtaaagtcgatatccataaaaatgttgtcaatgagacgaaaacagtcgacgtaccggttaaacgagaagaaatcgtgatcgaaagaaagcccggagatggtgcggctgcaactaccgatgtcaatgatacgctagaagacgacacgatcacgatcccaatcaaagaagaacagatcgatgtcaacaaacgcccggtcgttcgagaagaagttgacattcgtaaacaagaacgcgaagatatgaaacaagtaagtgaaaacgtcggccgcgaagaactagatatcgatacgagtggtgatgcccacgtagaagacttacgcgataatgatcgcaacaagcatgaccggagctagtttctagctttgattttatcaaaccttttgaacaagaacttaaaaaagattactggcagccatcagaagatggctgtcagtaatcttttttggctctttgtgtgcgttcccgcaattaaaagccaaagaagccgaaaccaacgtcttcactttggcttcggcttcttttactgaatcaactaaaagaccacgtggtttccacgtctggttttactgctcttatactaaaaaaatggactatttgatagttatagaccctatatattcatagcccctttctgtttggtgttaaagtattagtcatcgatgtcatgcactatcttgtttagctccgttttgatggaactgggaatattttctaaattgaaatgattatatatttctttatccttaagcatccttttttgtgccttatttaatttacactcattgttacccactacccattcatcctttgtacgtataaaggggttttgcgcactttcctttaacgcgttttgaacatcttcataaggtaaataaaattcaattgtagatttatttaattggtagattgtaacgtctccatcttttcaaaacgacttaattctacgggctataaataacttaatttgccagtgtataacgtttcagattaagctaccactatgctacttatgtacaaaaaaagacagcctaagctgtctcaagataaactcttttaaaattgtacgcctaatgaacctaagccagtcgcattccatttgtatccctcggagcgagcaatccgcatcaattttcggattcgttcagcgttttcattacccaataagttcttaccattcatggtccaaattgtaattccatttacggttttagctgctaccacttgagctggcatatcttctgtagataaatgttttgctgcaattaaaagaatatccttaatatgctgatcaatttctttgtgggccaaatcattatacatttcatcaattatttcgaaaacttgctcattaatagtctttgacattatatcaccttccgttaaccagaatataccacaacttcatgtttatgtcgctacttccctaatgattgtaattgcatttcactttattaaaaaagttttcaaatatctctttattgattttcgtgatgcatcatcacatcaattacacgtcgtattgacatccttcattaccttaagcagttgttgcaactggtccttcttctgctttcttctctttatctttcttctgtttccgaattttatcctttgcgcgcttataaacatctttgggactaggaagcccaaatacataaactaccatgatatcccttctttcttactttaattgtagactcaatcttacagtactacaaatattcgggattaaaaaagacagcctaggctgccttgataatattaatagattaatttatatacctctttgcccgaatctgttaaagtttcttgtactgcatttttaccgccaaacgtgccagacgccgtgaaacatagtccatttacttctaactccttgattgctagtcctaatgatgttattgaaatgtcattaaatatttcagtttttaataatccttgtgcaatatactcactgttatcaccgttcattattcctccaacagtgatgcttgctttattgggagctttcataatcggccatctattagctttctgcaatactaagagtgcctgtggtgatagtttggcaatcatagacaacacaactctcttatttgaaaagtgttcttttaaatcactatcattacttatattccttagaacgttggctaaaacatttaaggtatcatcatctgccggtgaatcattaagtatttctattaattttgaatataatgtcagaccatagggatccgtaattaagtcaacaatacattgtaacgctttatcgtggtcgtctgatttttgtacataagaagcaacgaccaaagattttttcatatcagatatgttttggcctagttcatcgccagtttcaatcacatcaaaaataagactccctaaagacccatttaatatatcaacaaccaattctcgacctttagattttcctgtatcgattgcagcctctgcatactcatcagctgttaacctctgttgctctattctttgcttaagcgtttttttatcagcctttaaaattgattctggattattgatcatttctaacaaactttctctatccataattttcaccctccaataaatctataatacaaaaccccagccataaaggctaggactattggaggtgaagtatgtgccattactggcaatatcgcaggtgtggatttgcaccacacaattgccgttttaaggcgtaaagacgctttacctattccgccactgcgataatatcctagccgggactcgaacccgaatcgtgaccgcaggtgcacttccgcgctgctctatttaagctactaggaatggttaggtccgcgatcatccacggcaacaacgtgctaaccccacgcttccagcaattagaattgaagtcgattaacctaacaaagtttgattaacgctaattgccgggtataacagatcgtatttttggcaacagcgcgaccaccgttttccgccggtgattactggccacagtttaagcgcgctttactaataatccataatactaatttatcacggaaatccggctaataaccacagacaatccgcacaaaaaccgcactttttatttcttgaactcgtgcaagtcttcaatcatgaatgcatctgcaaattgcaggcatgcccgattcttataatatctgaatcgagtttcaccatacccgctttcaagctgagctgctgttacagtgttttcttttacatagatactccatagaatcttcttttgcgtagttataaatacagtaataacaatgcattcacgtattatatagccacaaaaaactgtgtatataaccacaaaaaactgtgtatatagccacaaaaaaataaaataagtggctatataatgttataataaaagcataaagaaattcccgtctaaaagtttttctttatgcttatccaacaacacacccaaaggagtgtatttatatgactattataccagaatcaaagacaaggcaggtacagaccttgaatgaattatcaaaaagaaaagtcgttgaacataatagtttaatcacatccattgccaagatggataagacaccactcaaaatgtttgaactagcggtgtttttaattgataccgacaatccacctcaggatcagacggtttatttatcaaagaaagaaatgtttgctttctttaaagtggatgacaacgataagcatagtcgttttaaagaggcaattgaaaaaatgcaaaaacaggctttttttcagattaaaaaagaacaagataaaggttttaagtttgttagcattgtgccaattccatatgtagaatggacagattatcatgatgaggtattaattcgatttagtcctgaaattatgccctatttaattaatctcaaaaccaattttacacaacatgccttgtcagaaatttccgaattgaatagtaaatatgccgttattttgtatcgttggttatcgatgaattacaaccaatacgagcactatagtgttaaaggtggacgccgagaagaacaaattgacaggtaccgtaatcctgaaattggtatgaaagagttacgagaaatgactgatacgataacagaatacaaacgattcactcactttgaaacgagagtattgaaagaacctctagcagaaatcacaaatcataccagctttaatgttatatatgaaaaagttaaaaaaggacgcagcattgatagtatcgtctttcatatcactaaaaagcaggtggcagatgatattagttacaagttagatgatccaacttatattgacggtaagataaggcaagaagaaagtgaaaaagacctcgtatatgaagctatgaaaagtccatatacaaaattgctgatggaacatttcttgttgtcatatattgatttgacggatacggctattttgtcagggttacagaaaaatgtttatccactttatgacaaattaaaagagttacgtggtttaaagggcgtgaaagaacacttagcatatattcgagataaacaagatgactattctaaaaagaatattgctaagtatcttaaaaaatcgattggacagtatctaccaatcgttaaaaggcaggatatagatcatgagtgaaaatttaaaaacaatccgagaacttgctgaagagttagatgtgtctaaacaagccattcaatatcatattaaatcactgacaaataaaagtagacaaaaaaatgatagaggaattgttgttttgtctatcgaagaacagcgatttataaggtctaaggtagacaaacaaacaaacaaaaaactatcaaaaaaacagacaaataagagacaaacagacaaacaaaaatcatgggatatcaaccaatatttattaaatgaaatcgaagaagttaaaaaaatagagacgaacaactagcagtcaaagaacgacaattagaaaatagagatttgcaaatatctcaaatgcaaaacttgttagaccaacaacagagactagcgctgcaagataaaaaattgttagaagaatacaaatctgaaatcaaagacctgaaatcattgactacacaatcaaaaccttttgtaaaagaagaagttaatgatcataatgatttagaagagagcgccactcaggaccaaaataaatctaaaaaatggtggccatttagcaaacgaggacgagaaaatgattgattcaaaaattatggagaaaacaggggccattttgaaagattttggtaatacctatttttcagataatggcactttaaagcgccacaaagtacatagaagaccttgatacttatacacctatgttgatgaaagcattgcatttaagtttatggtgtatcatggtgttatacaaattaaaattataggtagtttagaatgaaaaaaatttattttttatgtacagtaaaaagtctagtggtaataagtcaagaagataattgatataaatatcgtgtaattttacaaaattggcaacactaaactaagcctacttaaaattcataaaaattttagtaggtattccaaagatttgcgtgaataactacgttattccttcaacacactctttggtggtgtgtaaagttggtgattgcgtagtagcgcatcaaccaaacgcacaaattttctggcggttaaaacaatagctcggcggtgcttatttatcggggtttcggtatatttctttttataaaaagctgtgtattcaggtaagtgattttttaccgagttggcggcttcaactaagtaataacgtaaataatgattaccttgttttgttagtggtgtgacttctgactgataatttccagattgtttaactttccaggatagaccggcatatttggcgacttttgcttgatcatcaaatcgttcgatttgaccgacttcagctaagatacctgcggcataaaccttaccgattcctggcacactggttaagcattgatattcaggaattatttcaactagtttttcgatacctttatcaatttgtttaatactttgctgtaatgaacgcatttgaactaccaaggtactgagaataatatcaatcgactcattcattaatcgcggcaactgatagctatttttaatggcacgctgaatggttttaaccagtttttcaggatttttaaagttactgcggccaacattttgaatcaattggacgaagtcctctagtggtaaattggctaattcatctaatgagtagttttcagtcattaaatgtacaattgtggcgctaaaaatgccggtagattctgattttaattccttactaagcgtattacatttataagttaagttttctaagaaatgttgtttaaccgttactaattcggtaactagttgatatctagtacgggttaaacgttgaagtgccatatatttttcttctttgataggtgacgttgtaaaacgttgaattcgtaagtagtcagcaattcgcatggcatcattggtatcagttttgtcttcatcgaagacacgagaatattgcttgattttaaatgggttttcaacagtgactaccgttggtagtgcatttaagtctgcatcttcttggaaaaacatagctggatgaaaactatatagtgatgttgattccataccaatcacaatctgttcaaatgatacttctgcgtgatgttttaaaattaaggctttaatttcagaagcaccatttaaatcgttagcaacacttaaacgatttaggattgataagttactatcatcggtcataaaacaagcatcaatcttttcagaactaatatctaaaccaacaaataatttcacaggaaggacctcctttcgagagttatttggaacttgctttgatactgcgggattccccagaaaatctttacacagctacaacctcgcgtaacagaattttaaccaattggacttatgccgccttcaaactactacattgaagataagcctgattgaaaacagctagtgagttgggagagagcgtaaagactcgggtaacggacttactaaagtagagttaactacaggagtttttagcaaattcccgatagatccattccatggtcctattatattctgaagaatcccgcagtatcaaagtaataattaaattttattgtaagccaacggcttataaatatatcttacgaggagtttttaacaaaacaagagctacaaacttttaatcgagagtttgatcctggctcaggacgaacgctggcggcgtgcctaatacatgcaagtcgaacgcactctcgttagattgaagaagcttgcttctgattgataacatttgagtgagtggcggacgggtgagtaacacgtgggtaacctgccctaaagtgggggataacatttggaaacagatgctaataccgcataaaacctagcaccgcatggtgcaaggttgaaagatggtttcggctatcactttaggatggacccgcggtgcattagttagttggtgaggtaaaggctcaccaagaccgtgatgcatagccgacctgagagggtaatcggccacactgggactgagacacggcccagactcctacgggaggcagcagtagggaatcttccacaatggacgaaagtctgatggagcaacgccgcgtgagtgaagaaggttttcggatcgtaaaactctgttgttggagaagaacgtatttgatagtaactgatcaggtagtgacggtatccaaccagaaagccacggctaactacgtgccagcagccgcggtaatacgtaggtggcaagcgttgtccggatttattgggcgtaaagcgagcgcaggcggtttcttaagtctgatgtgaaagccttcggctcaaccgaagaagtgcatcggaaactgggaaacttgagtgcagaagaggacagtggaactccatgtgtagcggtgaaatgcgtagatatatggaagaacaccagtggcgaaggcggctgtctggtctgtaactgacgctgaggctcgaaagcatgggtagcaaacaggattagataccctggtagtccatgccgtaaacgatgagtgctaggtgttggagggtttccgcccttcagtgccgcagctaacgcattaagcactccgcctggggagtacgaccgcaaggttgaaactcaaaggaattgacgggggcccgcacaagcggtggagcatgtggtttaattcgaagcaacgcgaagaaccttaccaggtcttgacatcctttgaccactctagagatagagctttcccttcggggacaaagtgacaggtggtgcatggttgtcgtcagctcgtgtcgtgagatgttgggttaagtcccgcaacgagcgcaacccttattactagttgccagcatttagttgggcactctagtgagactgccggtgacaaaccggaggaaggtggggacgacgtcaaatcatcatgccccttatgacctgggctacacacgtgctacaatggatggtacaacgagtcgcgagaccgcgaggtttagctaatctcttaaaaccattctcagttcggattgtaggctgcaactcgcctacatgaagccggaatcgctagtaatcgcggatcagcatgccgcggtgaatacgttcccgggccttgtacacaccgcccgtcacaccatgagagtttgtaacacccaaagccggtgaggtaaccttcgggagccagccgtctaaggtgggacagatgattagggtgaagtcgtaacaaggtagccgtaggagaacctgcggctggatcacctcctttctaaggaataatacggaaaaccttgtacatttgcgaagtcgaaactttgtttagttttgagaggtctactctccctgaattattcatacttttcccttaaggactactttttgttgttgtcatgctagttcgcatctttttcgtttttcacctgttgggtgtacaaaaagagcacatcctgtgctattgtaaaatcgatgaaaaccacaaagaacaggagtgctccttatgtcaactttacatcatgaaaaacttttattcaatgaccagatcaacatttctaatgacggtggtgagttagcgaacgatgccggaactttattaattgctgaatttctgcaccaaattcactttgaccagctcttagaagataacttgcattttaaagatgaccgtaaatattgtacctttcccttgaacaatttatttaagcagttgctgttgcaattgctggcaggatactgccaagatcagtcggctaataccttgtcacacgccgttgattttaagctggtcttgtctcaagcggtcgcttcccagccgacactttcacgctttatcaatcacatttcagcgtctgggctcttttcagtcaaatcattgctcggctcggtagctcactttgttcttgggcagctaaatcaacatcagctgatccttgatctagattcgacacatgccgatacgtttggtgaccaagaaaagagtgcttataacggtcactaccagaccaacggttatcatcctttactagcctttgatgctttatcgggctgcttgttgaatgctcaattacgccccggcaatcgctatacttcccaaggtgcgactaaatttttattacggagcttacgggcctatgacggatcttccctggatgtcttagtgcggggagattctggtttcgcagctccagggatctaccatgcgtgtgataaaaagcaggctaagttcgtgattcgtttaaaagcgaactaccagctccaaagtcgggctgaaaacctgatccaagtgggtgaccaggacttcaccgaagctgaagtccaatggcatgtcctgcgagactattgtcctcaaagttggtcacgaccttatcgtgtgattattaaatcaacgcggccggcgggcaactttctgtttgaccatgagtttatcgtgaccaacttggaagaattaagcggtccacaagtctttgccctctatcaccaacgcggttccatggaagacttgatcaaagaagttaaacgtggctttcactttgataaaacggacagttctagttttgaggccaatgagttccggatgctggtagctggggtcgcttataatatactgcaagccatgaagaacttagttttaccaacaaagcttaaacacgctcaggtcgggacgatccgttttaaattactccatgtggcagctaaggtcacgcaccatgcgcgtcaagtctgggtccatttatctcagaccaatgtgttcgataaattattttggcagacactgttcaagattcaaaatctaaaaatatatccgctgtgaactcacaaaataaaaaatgtttttcttagggaaagggtgaagtctgtccttttttaaacagtccgacaacaaaactaacaaaaagctgctttttttacacactaaagtaactttgcacaaagttttaactgcaacgaaaagtatgaataattcaggatgaaaggtattattctagcaggcggttctgggacacgtttgtatcccatcacacgcgctttatcaaaacaattgattccaatctatgacaaaccaatgatttactatccaatgtcagtgctcatgttggccgggattcaagatattatgattatctcaaccccaactgatacaccacggtttaaagaattatttggcaacggcaatgacttagggttaaacatcgaatacgccgttcaagaacaacccaatggtttggcagaggctttcgtgattggggcggacttcatcggcgatgattcagtatgcttaatcttaggtgacaacatctattatggtggtggcctttcagaaatgctccaaagagcggctcaaaaagaatcaggcgcaaccgtttttggttatcatgtgaatgatccagaacgctttggcgttgttgattttgatgaaaatatgcatgctaaatcaatcgttgaaaagccagaacatccggcaagtaactatgcggtgactgggttatacttctacgacaaccaagttgtcgacattgcgaagaatattaaaccttcaccacgtggcgaactagaaattacagacatcaacaaagcgtatcttgaaaaaggccagctagatgttgaattaatgggccgtgggtttgcttggttagatactggaacccatgattcattacaagaagccagcagttttattgcgaccgttcaaaaacggcaaaacttgaaagtggcgtgtctagaagaaattgcttaccgcatgcactatatcgataaagcaaaagtgattgaattggcacaaccactcaagaaaaacgactacggtcaatatttattgcgattagtaaaagaagattaggggtaagtaatcatgggtaagttaaaagtcacaacaactaaattacaagacgttaaaattattgaaccagccgtctttggtgatcatcgtggattctttacagaatcttattcagatcgcgatttcaaagaagcgggcattgatattgatttcattcaagataatcactcactttcaacgcaagcaggcgttttacgaggcttacatttccaacgcggtaaagctgcgcaaacgaaattaattcgcgtggtgactggggctgtcttagatgtcatcgttgacgttcgtgcaggttcaccaacttacaaacaatgggaagggtacatcctttctgccagcaatcaccgtcaattacttgttccaaagggcttcgcccatggctttgtcactttgacggataacgttaacttcttgtataaatgtgatggctactatgatgcagaagctgacggcggtatttcattcaagacaccagaattaaacatggcagattgtaaaatttaagttgaacatttaagtggacagaaaaacccatcaaggtctttaatggtgttaccacacaatccattagaaagaaggaccttgatgagcaccactattttatcattccagaaccgtgttgtcattgaaacgcttcataatgaaggacgttccttgcgatacatcgctaactacttaggctttagtaagaccaccatctttaacgaacttcaccggctaaatagtgagtaccaggctgggctagcgcaaactgactttgaacgaaaggttagtcaacgggggcggaagtcttcgctcactaaaaaccttaaacacttgatcgaggaaaagattcaagtccagaagtggtcccctgaacaagttgcccatgtggtggggattgcctacaagacggtctataactggattgatcaaggatggcttgatatacagttgcccgatttgcctgatcatggaattcgtcgtcatcgtgctaaagaaaagcgtggtacgttcaatcacggccgctccattgaggagcggcctcataaagtcgaaactcgccaggaattcggccactttgaagctgataccgtactttctggtaaacgtaaaggtcaagctgtggctacttttgtggagcgtaagagtcgcctgacaattgttaaacggctccatggtcgcgacagtcagtccatgactcaagccgtacttgaactagctagtcaacttcaagacaagctcaagacgcttaccgtagatcatggtaaagagttcgctaactatcagacaattgaacggcgaactggtacacaggtttattttgcccatgcctattcaccgcatgaaagaggcagtaatgagaaccgtaaccgagttttgcggcgctttattcccaaaggccaagccattgaagaactaagtgatcaccaattggttcaaattaattggtatttgaattcacggccacttaaatgtcttaattggcatacaccaatcgagatcttcttgcttaatttacgtcattaaattcgttcaagttatttcttgcaatctgccaaataataaagccaaaacgtgctcccaaagtcagtttgcgtcgcttaataggtaattggtaaccatgttcatgcataaccaacgattccttgttaatgctcacgaactagccgactttgggggtgcgtttttattttaaaggtggaaggcggcttgtacacccacgatcagcattttgacgccgatggttgctaaaatcagccccattaacttggtgatcacgttcatgatgttgttgcccagcttgtccatgatttgttcaccgtagataaaaatgaagtaagcaatgactgctaaaacaacgaacgcggccacgacgatgaaggggttagttccactagccaagttcatggtggtggcaatggttccggggccggccaaaattggcatggctagcggagaaatcgcgacgttggtgttactactgttgacggaatccttaacggatttttcgggatcgtgctggatcggcgaaacgttaccttggatcatgtggtaaccaatcaaccccaaaatgattccgcccatgatgcggagtgcagcaaggttgataccaaaaatggtgaagatgtaatttccgagaaaggcaaacagtaccacgatgacggtcgccacgataaaagccagtcgggcaatcgcgttgatttccttgcgactgttatcagcagtcaaactgacgaacattggcaagttagcaaaggggttcataattgcaaaaaatgcggtgaatgaaagtaaaaatgcttgaactaaatgcatggtcgtcctccttgttaaacgttttcaatgcaatgattgttttttaattatatgggttaggtggggaaatgccaagtttggtgatttatgtaccgttattgaaaaattagacaataagtcatattaatattgttcttctaaagagacgattggccaattgattttgaccaagcaattacgtctaaaaaagatgctaaccaaccaacctttactgaatttgaaaaagataatccgtttgtttacggtgaaatttaaggagatcgacacactatgaaaaatattattgttaccggtggggccggctttatcggttctaacttcgtgcattatgtggtgaataaccacccagaagttcacgtgacggttttagataaattaacttacgctgggaaccgtgcgaacttggccggtttaccagcagaccgtgtggaattagttgttggcgatatctgtgacgctgaattagtggatcgcttagtccaaaagacagacgcagtggtacactatgctgccgaaagtcacaacgataattctttgaaagatccttcaccctttattcaaacgaacatcatcggttcatatacgttgatcgaagcttgtcgcaagtataatgtgcgttatcaccacgtttcaaccgatgaagtatacggtgatttaccattgcgtgaagacttaccagggcacggcgaaggcgttggtgaaaaattcactcctgaaacgcgttataacccaagtagtccttattcatcatcaaaggcgagctcagacttgttagtccgggcatgggtgcgttcattcggcctacaagcaaccatttcaaactgttcaaataactacggtccttatcaacacattgaaaaattcattccccgtcaaattaccaatattttaagtgggattcgaccaaaactttacggttcaggtcaaaatgtgcgtgattggattcatacgaatgatcactcaagcgccgtatgggcaatcctaaccaaaggcaaaatcggtgaaacttatttaatcggtgccgacggcgaacaaaacaattgattggccaattgattttgaccaagcaattacgtctgaaaaagatgccaaccaaccaacctttactgaatttgaaaaagataatccgtttgtttacggtgaaatttaaggagatcgacacactatgaaaaatattattgttactggtggggccggctttatcggttctaacttcgtgcattatgtggtgaataaccacccagaagttcacgtgacggttttagataaattaacttacgctggcaatcgcgctaacttagccggtttaccagcagaccgtgtggaattagttgttggcgatatctgtgacgctgaattagtcgataagttagttcaaaagacagacgcagttgtacactatgctgccgaaagtcacaacgataactctctaaaggatccttcaccttttattcaaacgaacattatcggctcatatacgttgattgaagcatgtcgcaagtataatgtgcgttatcaccacgtttcaaccgatgaagtatacggtgatttaccattgcgtgaagacttaccaggacacggcgaaggcgttggtgaaaaattcacgcctgaaacgcgttataacccaagtagcccttattcatcatcaaaggcgagctcagacttgttagtccgagcttgggtccgttcatttggcttacaagcaactatttcaaactgttcaaacaactatggtccttaccaacacattgaaaaattcattccacgtcaaattaccaatattttaagtgggattcgaccaaaactttacggttcaggtcaaaatgtgcgtgattggattcatacgaatgatcattcaagtgccgtttgggcaattttaaccaaaggcaaaatcggtgaaacttatttaatcggtgccgatggcgaacaaaataaccaaggcgatattcgcgacaaagatttcatgcgcagcgtcttccaacaagaaaaagtcagcggtgtgattcatttcgccgctttctcaatcgtgcccgaatcgatgcaagcaccacttaaatatttcgataataacacatacggcatgactgccttactcgaagtgatgaatgaattcgacgtcaaacacatcgtcttttcatcaacagcggccacttatggggaaccgaaatcaattccaattaaggaatccgacccacaagtcccaactaacccgtatggtgaaagtaaattaatgatggaaacgatgatgaaatgggctgacagagcttacggtattaaattcgttgcattacggtacttcaatgtcgctggtgccaaaccagatggttcaatcggtgaagatcatcacccagaaacccacttgttaccaatcgtgttacaagtggctgctggcaaacgtgaacaactctccatctttggtgatgattatgatacaccagatggcactaacgtccgcgactatgtccacgcgttagacttagccgacgcccatattttggccctcggttacctcgaagaaggccatgatagtaacgcctttaacttaggctcatcaactggtttttcaaatatggaaattgtcgaagccgctcgcaaagtgactggcaaggcaattcctgtgacaatggcaccgcgtcgtgctggtgatccaagtactttgattgccgcaagtgacaaagcacgcgaagtcttaggttggacgccacagtatgacaatatggaagcaattattgaaactgcctggaattggcatttaaatcatccgcggtgctcatggcaaaaagctaattattaaagggcgtgccctcgtgttagaagtcgtcaacgctaatttacttgctgggcaccgcattacgcgtatcttatcagtactcaaaattccgcgctcaacctactatgattatctacattggcagccaagtagaactgaacgccgccggcatttaattaaacaagaagtgttaacggcttggttaagatatccaatgtatggctacccacgattaacgatcttactaaatcaacagtctgatattcacgttagtcagcgtctggtctatcaacaaatgtgtgaattagggattagatctagaatggttaaacgaatcaataagccaaccactcagactgattatgatcagcgaccaaacttgattaagcagttaactgatcaatctggtattttattgactgatattacgtacattccccttaaccatacttggtgttacctagctagtgtctataatccagtaacccgacgggttattgcttaccaacttaatacgcagatgactaaagaactagcgactaacgttattacccaagtcatggcgcaagcagttaaaccacaaattattcatagtgatatgggaagccaatacacaagtgacttatttgaaaacactttatcgaagtatggtatcaagcattcttactcccgaaagggtcagcccggcgataacgcgcgaattgaaagttttcattcaattttgaaacgtgaatacgttaatttccaagattttaagacaattcattttttattgatggaggtttagctcagttgggagagcgtctgccttacaagcagagggtcacaggttcgagccctgtaacctccattgagtcgttagctcagttggtagagcatctgacttttaatcagagggtcgacagttcgagcctgtcacgactcatcggccaagttacacgccaaaatgcgggtgtggcggaattggcagacgcgctagatttaggttctagtgtctatatagacgtgggggttcaagtcccttcacccgcattcaattgaatattcaatgaaagttatcttattatgccgacttagctcagttggtagagcatctgatttgtaatcagagggtcgggcgttcgaatcgtctagtcggcattaagatgcggaagtagttcagtggtagaacatcaccttgccatggtgggggtcgcgggttcgaatcccgtcttccgctttcattatgattaagccggggtggcggaactggcagacgcacgggacttaaaatcccgcggtaggtgactaccgtaccggttcgattccggtcctcggcatcataatgaaaaatgcacccatagcgcaactggatagagtgtctgactacgaatcagaaggttgtaggttcgactcctactgggtgcatataacgggaaatagctcagcttggtagagcacctggtttgggaccagggggtcgcaggttcgaatcctgttttcccgaattaactattagtattcaaaagaaccatggtattaacgcaacaaaaaaagccctatctctaaggctttttaaaactgtataatgttcaattataccggtgatcggggtcgaaccgatacttccgtgaggaaacgggattttgaatcccgcgcgtctgccaattccgccacaccggcattttgaccaattaaggttagcgcctaaacgcaaaggcggtaaccggatttgaaccggtgataaaggttttgcagacctctgccttaccacttggctataccgccataaaagaacaaatcctgtcccttaaaaagtaaattgggctagctggattcgaaccagcgcatgacaggatcaaaacctgttgccttaccgcttggccatagcccaagaataaaggcggtatgtgggaatcgaacccacgtatgtcggatccacaaaccgatgtgttaaccacttcaccaataccgccatcattaacatgaataattatactacattcacacataatatgcaagctataatataaacagggatagtaggaattgaacccacactgacggttttggagaccgtagttctacctttaaactatatccctaaaaaatatggaggagagtggattcgaaccaccgaacccgaaggagcggatttacagtccgccgcgtttagccacttcgctactcctccaaaactacgtaatcgccaatatcagcgaatgcttgtttagcgtactctttagcgatatcatcagctgtaacgaataggtcgttagcaatctcgttacgcagcttatcaatttgctcacgcacactagcatttactagcaaccttgggccatttacattagcggtcttgtaatcaacgtcataagcttgcatataagcccatgtggcattgaatcgttgcagatagtacaagcagaacattttctgttgatcgtttaacccatcattagcagataattccttcactattttgggtgcaaccttttcaactttgtgtgcaccctttttgcttttggggtgcaccgcttttttatttggcccacgttcccatccattacgctgtttccatgatttcacggtattaatcgacacatcatatttatcagcgatgtctttgtacttcatcccagataaatagtcttcctttgcatcatttcttgattcatcatgcattacatagcaccgccctccttcttataattgtttttctccaataaaatacgccgctcattatctgaacgacgtttctcatctatcttcttctgtttaagccacttctctaaacgggcatctgctgccgtccattcaggtgtttcgtagccgtactttgaatgtattagtttcacaatgcctatcactcctttaattttaaggtacaatagttgtgctaacaaatccatcataattatcaatttgattaatatattctgctatgttccctttatatgtttgtacttgactaagtacaccttctttttctaaatattccttaatcttaccctctgctattgttgatgttgcaataccactaccacaaacaatcattaattttttcattgcgtttcactccttattttttaattaactttaactagctttttacttctaaatttgttgtaccagaccataattgctaaagtaactattccaattatcccgatacctccccaactcattatcttacccagtcccacaataacccaagttgtccaaacaccaccatcgctgagcactgaaattgatgaattcccttgcattgcgaaatgtgcggctttggctgactgcgttactaacggtgctacccatgaagcgatataaagacttgcaacaatattaacaatgcccccaataattgttctaaaaatatcaccgcggaaaacagctgccattacagcaatcatatatggtaaagttgctaaatcaccaaatggtaaaacagaattgcctggcgtgataactgcaataatcaatgttaatggcactagaattaaagctgatgatagaacacgaattaaaatcgaaaccttttgtgaactagggctgtccaatatccaaatgggcgttcggattaattttacaatctaccataagcctaccgattttttaatattattttattcatcaatttccggcgccgacccaagctctgcctgaatcatccagattttcttctcaattgcggttttgagaccaatgaaaatatcttgggtactgaagtctttttcaacatcggatacttcaatgccgtgttggtaaaggtcttccaagtaacgatagccatcaactaagtgtgcgaggcgttctggggttattttgtcccattcaccaggccagtcttgaatcttagtgttttcggccatttcttttaaggtcgagtaaggactgccatcaagcgcaatcagccgttcagaaatgacatcgagttggctgtcaatttcttccatgaactcatccatcaaggggtgcaacttcaaaaagttgggtccacgcatgtaccaatgcgtctgatggataatcattgacatctggctcaaatcggcaacgagttgatttaatactgctttggttttcgtatatttcattagattgatctcctttcgatatggttatttacatctactttatcacgttttcaacgtggcgcactagcacaactggtcaatgaggggaataaatcttaccaagtaatggctgacgccttaggcgtcgccaaagctacgattagctatgagttggaccgagttaaaccttatgatccagaattagctcagcaagatgcagatcgcaaaaggcggaattgcggtcgtcgttcgatgctgacggcagcattagcgactttaattaccaatcacttacgattaacctggtcaccagaaaccattgcggccgcttataacttgagcactgcgtcaatttataattggcttaatcgtggctggctccccttcaaattgactgatctacccaatcggaatgtccgccagcaccgagtgagcgaaaatcgtgggaaatttacaagtgggacttccatcgaacaacggccaacaactgttaatcaacggttagcttttggtcattgggaagtagatacggtgctttctagtcgaagtgagtcacgatcatgtctggttacattcgtagaacgtaagacccgacttctatgggccatcaaagcccctaatagaacggctaaggctctaaacatcatgaatatgcgggtgtagtttagtggtaaaaccacagccttccaagctgttgtcgcgagtccgattctcgtcacccgcttttcatgggcctatagctcagctggttagagcgcacgcctgataagcgtgaggtcgatggttcgagtccatttaggcccattatctaaataatatggagaagtactcaagtggctgaagaggcgcccctgctaagggtgtaggtcgggaaactggcgcgagggttcaaatccctccttctccgttttgtatggcccgttggtcaagtggttaagacaccgccctttcacggcggtatcatgggttcaaatcccgtacgggtcattgtaacaatgttacattttatatgttttatggagaattacccaagtctggctgaagggaacggtcttgaaaaccgtcaggtgggttctgcccacgcgagagttcgaatctctcattctcctttatattatcgcgggatggagcagtctggtagctcgtcgggctcataacccgaaggtcgtaggttcaaaccctactcccgcaatctaaattaagtaatttaaattgaaagtcaaatttgttcgtacttttatgtccggattcttgacataggagcctcttgtcgaatcaatgtttcactcacataaaacttatggtataaattttctatacttttcgtgaatggtgcattgaatagacaacttaatataattacatttcgtctctcaactggcgagaatgcgacataatctttttcgtgagtttgcttcattatttgtaaataattctggtaatttaacaaatagcctcttccatgctccgattctactaaagtcattttataagtctcatttatcgatttaaccgacctgtaaatcgttttttgagatacggcaactacatcggccaattcatttgctgtcatgtaatctccattctttaacaaagcattcaatatctgattcatataaccagtcatattttcctccttatgtttatgatagcgctatttttattaaaaaaagataaacctttgcccgttgctacggtcattcttcttgtttttctttattctagtacatcttgtgtaacgtttgttaaatgcagttgatagtaattgcagttctcgcattaagacaagtacttttttatgatttactaagatattcatacgatgtaattcaccagttacacgacgataaccgtacgctggatgattcttcttgattatttggatggtttgtttaacagattggtcagatgaaccgttcggttcatgactaataatgtattcatacgtacttttggccataccaactatttttagaatttttactagtttgtgtttaagccttagctcttggatgacttgcgcttgttgttttcttcttcctggactaaggctcttaatttttttaggtattcattctcgatttgtagcaattcattttcttctctaagacgttctaactctgtttgttgccgtttttttgattgtttatcagctgacataattgtttgccgtcctttggaacgatataaggcatcagcaccctcagtctcccaaatatgttgccattgccagatggtcccgac
